United States Patent Application Publication US 2023/0127948 A1 - sequence listing, part 3

SEQ ID NO: 44515 - DNA, 20 bp, Human papillomavirus type 201
ttataaatcatcttttggaa

SEQ ID NO: 44516 - DNA, 20 bp, Human papillomavirus type 201
tattactactaatatagatg

SEQ ID NO: 44517 - DNA, 20 bp, Human papillomavirus type 201
attactactaatatagatgt

SEQ ID NO: 44518 - DNA, 20 bp, Human papillomavirus type 201
ttactactaatatagatgtg

SEQ ID NO: 44519 - DNA, 20 bp, Human papillomavirus type 201
ctactaatatagatgtgcca

SEQ ID NO: 44520 - DNA, 20 bp, Human papillomavirus type 201
acttaaatatttatacagta

SEQ ID NO: 44521 - DNA, 20 bp, Human papillomavirus type 201
gtaaattgggactgcaacct

SEQ ID NO: 44522 - DNA, 20 bp, Human papillomavirus type 201
ggactgcaacctgttcctgc

SEQ ID NO: 44523 - DNA, 20 bp, Human papillomavirus type 201
ctgcactggtagtttctgaa

SEQ ID NO: 44524 - DNA, 20 bp, Human papillomavirus type 201
ctgaatacaatggaaaacaa

SEQ ID NO: 44525 - DNA, 20 bp, Human papillomavirus type 201
tgaatacaatggaaaacaag

SEQ ID NO: 44526 - DNA, 20 bp, Human papillomavirus type 201
taagatatttgctcaggatg

SEQ ID NO: 44527 - DNA, 20 bp, Human papillomavirus type 201
aagatatttgctcaggatgc

SEQ ID NO: 44528 - DNA, 20 bp, Human papillomavirus type 201
agatatttgctcaggatgct

SEQ ID NO: 44529 - DNA, 20 bp, Human papillomavirus type 201
gctcaggatgctgaaatgta

SEQ ID NO: 44530 - DNA, 20 bp, Human papillomavirus type 201
ctcaggatgctgaaatgtat

SEQ ID NO: 44531 - DNA, 20 bp, Human papillomavirus type 201
caagaagaagctagggatcc

SEQ ID NO: 44532 - DNA, 20 bp, Human papillomavirus type 201
taattagaggaggggcaaat

SEQ ID NO: 44533 - DNA, 20 bp, Human papillomavirus type 201
gaggaggggcaaatgcttta

SEQ ID NO: 44534 - DNA, 20 bp, Human papillomavirus type 201
aaaatgcttcagatatagaa

SEQ ID NO: 44535 - DNA, 20 bp, Human papillomavirus type 201
aaatgcttcagatatagaaa

SEQ ID NO: 44536 - DNA, 20 bp, Human papillomavirus type 201
gctacccctagcagagtaat

SEQ ID NO: 44537 - DNA, 20 bp, Human papillomavirus type 201
cagatggcacagttattagg

SEQ ID NO: 44538 - DNA, 20 bp, Human papillomavirus type 201
ttaggcctactgttcctgta

SEQ ID NO: 44539 - DNA, 20 bp, Human papillomavirus type 201
ggcctactgttcctgtagag

SEQ ID NO: 44540 - DNA, 20 bp, Human papillomavirus type 201
ctgtagagcctataggtcca

SEQ ID NO: 44541 - DNA, 20 bp, Human papillomavirus type 201
aaatagaggcgggaaggaaa

SEQ ID NO: 44542 - DNA, 20 bp, Human papillomavirus type 201
gaataggatacgtcacttgt

SEQ ID NO: 44543 - DNA, 20 bp, Human papillomavirus type 201
aataggatacgtcacttgta

SEQ ID NO: 44544 - DNA, 20 bp, Human papillomavirus type 201
tataatagaagaattttaca

SEQ ID NO: 44545 - DNA, 20 bp, Human papillomavirus type 201
tacaacaaccaaccagaaac

SEQ ID NO: 44546 - DNA, 20 bp, Human papillomavirus type 201
tgtagaccctatagctcagt

SEQ ID NO: 44547 - DNA, 20 bp, Human papillomavirus type 201
gtagaccctatagctcagtt

SEQ ID NO: 44548 - DNA, 20 bp, Human papillomavirus type 201
tagaccctatagctcagtta

SEQ ID NO: 44549 - DNA, 20 bp, Human papillomavirus type 201
cagaatacagcatttactga

SEQ ID NO: 44550 - DNA, 20 bp, Human papillomavirus type 201
actgaggctgatttggaaga

SEQ ID NO: 44551 - DNA, 20 bp, Human papillomavirus type 201
ccgttggtcatccttacttt

SEQ ID NO: 44552 - DNA, 20 bp, Human papillomavirus type 201
gtcatccttactttgaaatt

SEQ ID NO: 44553 - DNA, 20 bp, Human papillomavirus type 201
ctttgaaattcgtgacaatg

SEQ ID NO: 44554 - DNA, 20 bp, Human papillomavirus type 201
gaaattcgtgacaatgtaga

SEQ ID NO: 44555 - DNA, 20 bp, Human papillomavirus type 201
aaattcgtgacaatgtagat

SEQ ID NO: 44556 - DNA, 20 bp, Human papillomavirus type 201
ttggagacagtctattcttt

SEQ ID NO: 44557 - DNA, 20 bp, Human papillomavirus type 201
tggagacagtctattctttt

SEQ ID NO: 44558 - DNA, 20 bp, Human papillomavirus type 201
ggagacagtctattctttta

SEQ ID NO: 44559 - DNA, 20 bp, Human papillomavirus type 201
gagacagtctattcttttat

SEQ ID NO: 44560 - DNA, 20 bp, Human papillomavirus type 201
ttttatggaaagcgagaaca

SEQ ID NO: 44561 - DNA, 20 bp, Human papillomavirus type 201
atatttcagctttgtaaaat

SEQ ID NO: 44562 - DNA, 20 bp, Human papillomavirus type 201
cagctttgtaaaattccact

SEQ ID NO: 44563 - DNA, 20 bp, Human papillomavirus type 201
agctttgtaaaattccacta

SEQ ID NO: 44564 - DNA, 20 bp, Human papillomavirus type 201
gtaaaattccactacaggct

SEQ ID NO: 44565 - DNA, 20 bp, Human papillomavirus type 201
taaaattccactacaggctg

SEQ ID NO: 44566 - DNA, 20 bp, Human papillomavirus type 201
cattgctggcagagccatat

SEQ ID NO: 44567 - DNA, 20 bp, Human papillomavirus type 201
attgctggcagagccatatt

SEQ ID NO: 44568 - DNA, 20 bp, Human papillomavirus type 201
ctggcagagccatatttgca

SEQ ID NO: 44569 - DNA, 20 bp, Human papillomavirus type 201
gcaataaatttgcacacttc

SEQ ID NO: 44570 - DNA, 20 bp, Human papillomavirus type 201
caataaatttgcacacttca

SEQ ID NO: 44571 - DNA, 20 bp, Influenza A virus
aactgtataggaaacttaag

SEQ ID NO: 44572 - DNA, 20 bp, Influenza A virus
agagggagataacgttccat

SEQ ID NO: 44573 - DNA, 20 bp, Influenza A virus
catggggccaaagaaatagc

SEQ ID NO: 44574 - DNA, 20 bp, Influenza A virus
ttctgctggtgcacttgcca

SEQ ID NO: 44575 - DNA, 20 bp, Influenza A virus
tgctggtgcacttgccagtt

SEQ ID NO: 44576 - DNA, 20 bp, Influenza A virus
ggatcttgcacttgatattg

SEQ ID NO: 44577 - DNA, 20 bp, Influenza A virus
cacttgatattgtggattct

SEQ ID NO: 44578 - DNA, 20 bp, Influenza A virus
atattgtggattcttgatcg

SEQ ID NO: 44579 - DNA, 20 bp, Influenza A virus
tggattcttgatcgtctttt

SEQ ID NO: 44580 - DNA, 20 bp, Influenza A virus
ttgatcgtctttttttcaaa

SEQ ID NO: 44581 - DNA, 20 bp, Human papillomavirus type 16
tatgtagaggctgtagtgga

SEQ ID NO: 44582 - DNA, 20 bp, Human papillomavirus type 16
atgtagaggctgtagtggaa

SEQ ID NO: 44583 - DNA, 20 bp, Human papillomavirus type 16
tgtagaggctgtagtggaaa

SEQ ID NO: 44584 - DNA, 20 bp, Human papillomavirus type 16
ggtagattttatagtaaatg

SEQ ID NO: 44585 - DNA, 20 bp, Human papillomavirus type 16
gtagattttatagtaaatga

SEQ ID NO: 44586 - DNA, 20 bp, Human papillomavirus type 16
caggtagaagggcgccatga

SEQ ID NO: 44587 - DNA, 20 bp, Human papillomavirus type 16
cagtctcatggcgcccttct

SEQ ID NO: 44588 - DNA, 20 bp, Human papillomavirus type 16
agtctcatggcgcccttcta

SEQ ID NO: 44589 - DNA, 20 bp, Human papillomavirus type 16
tacctgtaacatctgctgag

SEQ ID NO: 44590 - DNA, 20 bp, Human papillomavirus type 16
ccacttcagtattgccatac

SEQ ID NO: 44591 - DNA, 20 bp, Human papillomavirus type 16
gccaacgtttaaatgtgtgt

SEQ ID NO: 44592 - DNA, 20 bp, Human papillomavirus type 16
ccaacgtttaaatgtgtgtc

SEQ ID NO: 44593 - DNA, 20 bp, Human papillomavirus type 16
aaatgtgtgtcaggacaaaa

SEQ ID NO: 44594 - DNA, 20 bp, Human papillomavirus type 16
aatgtgtgtcaggacaaaat

SEQ ID NO: 44595 - DNA, 20 bp, Human papillomavirus type 16
tgaaaatgatagtacagacc

SEQ ID NO: 44596 - DNA, 20 bp, Human papillomavirus type 16
aagtgtatttaactgcacca

SEQ ID NO: 44597 - DNA, 20 bp, Human papillomavirus type 16
aactgcaccaacaggatgta

SEQ ID NO: 44598 - DNA, 20 bp, Human papillomavirus type 16
actgcaccaacaggatgtat

SEQ ID NO: 44599 - DNA, 20 bp, Human papillomavirus type 16
gatggagacatatgcaatac

SEQ ID NO: 44600 - DNA, 20 bp, Human papillomavirus type 16
atggagacatatgcaataca

SEQ ID NO: 44601 - DNA, 20 bp, Human papillomavirus type 16
ccccagatgtatcaggattt

SEQ ID NO: 44602 - DNA, 20 bp, Human papillomavirus type 16
agtattactacttcaactga

SEQ ID NO: 44603 - DNA, 20 bp, Human papillomavirus type 16
gtattactacttcaactgat

SEQ ID NO: 44604 - DNA, 20 bp, Human papillomavirus type 16
ctacttcaactgataccaca

SEQ ID NO: 44605 - DNA, 20 bp, Human papillomavirus type 16
aactgataccacacctgcta

SEQ ID NO: 44606 - DNA, 20 bp, Human papillomavirus type 16
cctcctgtcccagtatctaa

SEQ ID NO: 44607 - DNA, 20 bp, Human papillomavirus type 16
taagcacggatgaatatgtt

SEQ ID NO: 44608 - DNA, 20 bp, Human papillomavirus type 16
cacgcacaaacatatattat

SEQ ID NO: 44609 - DNA, 20 bp, Human papillomavirus type 16
ctgcatgataatatatgttt

SEQ ID NO: 44610 - DNA, 20 bp, Human papillomavirus type 16
gtgcgtgcaacatattcatc

SEQ ID NO: 44611 - DNA, 20 bp, Human papillomavirus type 16
tataatccagatacacagcg

SEQ ID NO: 44612 - DNA, 20 bp, Human papillomavirus type 16
ataatccagatacacagcgg

SEQ ID NO: 44613 - DNA, 20 bp, Human papillomavirus type 16
taatccagatacacagcggc

SEQ ID NO: 44614 - DNA, 20 bp, Human papillomavirus type 16
gggcctgtgtaggtgttgag

SEQ ID NO: 44615 - DNA, 20 bp, Human papillomavirus type 16
ggcctgtgtaggtgttgagg

SEQ ID NO: 44616 - DNA, 20 bp, Human papillomavirus type 16
cagtaaatccaggtgattgt

SEQ ID NO: 44617 - DNA, 20 bp, Human papillomavirus type 16
tccaccattagagttaataa

SEQ ID NO: 44618 - DNA, 20 bp, Human papillomavirus type 16
gagttaataaacacagttat

SEQ ID NO: 44619 - DNA, 20 bp, Human papillomavirus type 16
ataaacacagttattcagga

SEQ ID NO: 44620 - DNA, 20 bp, Human papillomavirus type 16
ttcaggatggtgatatggtt

SEQ ID NO: 44621 - DNA, 20 bp, Human papillomavirus type 16
gtgaaaatgtaccagacgat

SEQ ID NO: 44622 - DNA, 20 bp, Human papillomavirus type 16
atacattaaaggctctgggt

SEQ ID NO: 44623 - DNA, 20 bp, Human papillomavirus type 16
tacattaaaggctctgggtc

SEQ ID NO: 44624 - DNA, 20 bp, Human papillomavirus type 16
aaggctctgggtctactgca

SEQ ID NO: 44625 - DNA, 20 bp, Human papillomavirus type 16
agccagttcaaattattttc

SEQ ID NO: 44626 - DNA, 20 bp, Human papillomavirus type 16
ggaagtaaatttaaaggaaa

SEQ ID NO: 44627 - DNA, 20 bp, Human papillomavirus type 16
aaaggaaaagttttctgcag

SEQ ID NO: 44628 - DNA, 20 bp, Human papillomavirus type 16
aaggaaaagttttctgcaga

SEQ ID NO: 44629 - DNA, 20 bp, Human papillomavirus type 16
tctgcagacctagatcagtt

SEQ ID NO: 44630 - DNA, 20 bp, Human papillomavirus type 16
ctgcagacctagatcagttt

SEQ ID NO: 44631 - DNA, 20 bp, Human papillomavirus type 16
gcacaaaatgtgttttttta

SEQ ID NO: 44632 - DNA, 20 bp, Human papillomavirus type 16
ttttaaatagttctatgtca

SEQ ID NO: 44633 - DNA, 20 bp, Human papillomavirus type 16
tttaaatagttctatgtcag

SEQ ID NO: 44634 - DNA, 20 bp, Human papillomavirus type 16
ttaaatagttctatgtcagc

SEQ ID NO: 44635 - DNA, 20 bp, Human papillomavirus type 16
taaatagttctatgtcagca

SEQ ID NO: 44636 - DNA, 20 bp, Human papillomavirus type 16
caggacccacaggagcgacc

SEQ ID NO: 44637 - DNA, 20 bp, Human papillomavirus type 16
aggacccacaggagcgaccc

SEQ ID NO: 44638 - DNA, 20 bp, Human papillomavirus type 16
ccacagttatgcacagagct

SEQ ID NO: 44639 - DNA, 20 bp, Human papillomavirus type 16
tgcacagagctgcaaacaac

SEQ ID NO: 44640 - DNA, 20 bp, Human papillomavirus type 16
gaatgtgtgtactgcaagca

SEQ ID NO: 44641 - DNA, 20 bp, Human papillomavirus type 16
cataatataaggggtcggtg

SEQ ID NO: 44642 - DNA, 20 bp, Human papillomavirus type 16
tattatggaatctttgcttt

SEQ ID NO: 44643 - DNA, 20 bp, Human papillomavirus type 16
tggaatctttgctttttgtc

SEQ ID NO: 44644 - DNA, 20 bp, Human papillomavirus type 16
gctttttgtccagatgtctt

SEQ ID NO: 44645 - DNA, 20 bp, Human papillomavirus type 16
ctttttgtccagatgtcttt

SEQ ID NO: 44646 - DNA, 20 bp, Human papillomavirus type 16
caatattgtaaccttttgtt

SEQ ID NO: 44647 - DNA, 20 bp, Human papillomavirus type 16
taaccttttgttgcaagtgt

SEQ ID NO: 44648 - DNA, 20 bp, Human papillomavirus type 16
tgttgcaagtgtgactctac

SEQ ID NO: 44649 - DNA, 20 bp, Human papillomavirus type 16
gttgcaagtgtgactctacg

SEQ ID NO: 44650 - DNA, 20 bp, Human papillomavirus type 16
ttgcaagtgtgactctacgc

SEQ ID NO: 44651 - DNA, 20 bp, Influenza A virus
cggaaaaggcaatgaaagaa

SEQ ID NO: 44652 - DNA, 20 bp, Influenza A virus
gcatcaatatgcacacactt

SEQ ID NO: 44653 - DNA, 20 bp, Influenza A virus
gaagtctgcttcatgtactc

SEQ ID NO: 44654 - DNA, 20 bp, Influenza A virus
atgtactctgatttccactt

SEQ ID NO: 44655 - DNA, 20 bp, Influenza A virus
gtcgatgaagtggaaatcag

SEQ ID NO: 44656 - DNA, 20 bp, Influenza A virus
ctcccggatctgtatgacta

SEQ ID NO: 44657 - DNA, 20 bp, Influenza A virus
tcccggatctgtatgactac

SEQ ID NO: 44658 - DNA, 20 bp, Influenza A virus
cattgaaattggagtgacga

SEQ ID NO: 44659 - DNA, 20 bp, Influenza A virus
attgaaattggagtgacgag

SEQ ID NO: 44660 - DNA, 20 bp, Influenza A virus
aaattggagtgacgaggagg

SEQ ID NO: 44661 - DNA, 20 bp, Influenza A virus
aggacattgaaaatgaagag

SEQ ID NO: 44662 - DNA, 20 bp, Influenza A virus
aaaatgaagagaagattcca

SEQ ID NO: 44663 - DNA, 20 bp, Influenza A virus
caaggacaaagaacatgaag

SEQ ID NO: 44664 - DNA, 20 bp, Influenza A virus
aagtgggcactcggtgagaa

SEQ ID NO: 44665 - DNA, 20 bp, Influenza A virus
tccggtgccatgttctcacc

SEQ ID NO: 44666 - DNA, 20 bp, Influenza A virus
ccccaatcgaacacattgca

SEQ ID NO: 44667 - DNA, 20 bp, Influenza A virus
caagcatgagacggaactat

SEQ ID NO: 44668 - DNA, 20 bp, Influenza A virus
tacagcagaggtgtcccact

SEQ ID NO: 44669 - DNA, 20 bp, Influenza A virus
acagcagaggtgtcccactg

SEQ ID NO: 44670 - DNA, 20 bp, Influenza A virus
cagcagaggtgtcccactgc

SEQ ID NO: 44671 - DNA, 20 bp, Influenza A virus
gtaagtatggaattttccct

SEQ ID NO: 44672 - DNA, 20 bp, Influenza A virus
taagtatggaattttccctt

SEQ ID NO: 44673 - DNA, 20 bp, Influenza A virus
tcccttaccgacccaaggtt

SEQ ID NO: 44674 - DNA, 20 bp, Influenza A virus
cccttaccgacccaaggttg

SEQ ID NO: 44675 - DNA, 20 bp, Influenza A virus
ccttaccgacccaaggttgg

SEQ ID NO: 44676 - DNA, 20 bp, Influenza A virus
tttgaaaacaaatcagaaac

SEQ ID NO: 44677 - DNA, 20 bp, Influenza A virus
gaaaacaaatcagaaacatg

SEQ ID NO: 44678 - DNA, 20 bp, Influenza A virus
aaaacaaatcagaaacatgg

SEQ ID NO: 44679 - DNA, 20 bp, Influenza A virus
gagagtcacctaaaggagtg

SEQ ID NO: 44680 - DNA, 20 bp, Influenza A virus
ccgatggaaccttcctccac

SEQ ID NO: 44681 - DNA, 20 bp, Influenza A virus
aatgtaagtgctcttattag

SEQ ID NO: 44682 - DNA, 20 bp, Influenza A virus
ttaggtagctccttttgttc

SEQ ID NO: 44683 - DNA, 20 bp, Influenza A virus
ggtagctccttttgttcagt

SEQ ID NO: 44684 - DNA, 20 bp, Influenza A virus
tgttcagtctttgttttttc

SEQ ID NO: 44685 - DNA, 20 bp, Influenza A virus
gttcagtctttgttttttct

SEQ ID NO: 44686 - DNA, 20 bp, Influenza A virus
agcaatctggcctccctgtc

SEQ ID NO: 44687 - DNA, 20 bp, Influenza A virus
gcaaatgttgtgaggaagat

SEQ ID NO: 44688 - DNA, 20 bp, Influenza A virus
tgaggaagatgatgactaat

SEQ ID NO: 44689 - DNA, 20 bp, Influenza A virus
tgaattagtcatcatcttcc

SEQ ID NO: 44690 - DNA, 20 bp, Influenza A virus
gtcatcatcttcctcacaac

SEQ ID NO: 44691 - DNA, 20 bp, Influenza A virus
ggaaaagggtacatgttcga

SEQ ID NO: 44692 - DNA, 20 bp, Influenza A virus
gaaagtaagagtatgaagtt

SEQ ID NO: 44693 - DNA, 20 bp, Influenza A virus
cggacacaagtaccagcgga

SEQ ID NO: 44694 - DNA, 20 bp, Influenza A virus
caggtcaatatttgcgagca

SEQ ID NO: 44695 - DNA, 20 bp, Influenza A virus
aggtcaatatttgcgagcat

SEQ ID NO: 44696 - DNA, 20 bp, Influenza A virus
gtgggacggactccaatcct

SEQ ID NO: 44697 - DNA, 20 bp, Influenza A virus
gccctcatagtgaatgcacc

SEQ ID NO: 44698 - DNA, 20 bp, Influenza A virus
cctcatgattcggtgcattc

SEQ ID NO: 44699 - DNA, 20 bp, Influenza A virus
ggtgcattcactatgagggc

SEQ ID NO: 44700 - DNA, 20 bp, Influenza A virus
actatgagggcgaagtcatc

SEQ ID NO: 44701 - DNA, 20 bp, Influenza A virus
gtgttacagtaataaagaac

SEQ ID NO: 44702 - DNA, 20 bp, Influenza A virus
cagtaataaagaacaatatg

SEQ ID NO: 44703 - DNA, 20 bp, Influenza A virus
gaccagcaacagcccaaatg

SEQ ID NO: 44704 - DNA, 20 bp, Influenza A virus
agctatttatcaaagactac

SEQ ID NO: 44705 - DNA, 20 bp, Influenza A virus
atcaaagactacagatacac

SEQ ID NO: 44706 - DNA, 20 bp, Influenza A virus
cagaggtctgcttgaaatgg

SEQ ID NO: 44707 - DNA, 20 bp, Influenza A virus
aaatgggaattgatggatga

SEQ ID NO: 44708 - DNA, 20 bp, Influenza A virus
atggatgaagactaccaagg

SEQ ID NO: 44709 - DNA, 20 bp, Influenza A virus
tgtaatcctatgaacccgtt

SEQ ID NO: 44710 - DNA, 20 bp, Influenza A virus
ataggattacacaacctgcc

SEQ ID NO: 44711 - DNA, 20 bp, Human papillomavirus type 63
ccagctttttccttataaaa

SEQ ID NO: 44712 - DNA, 20 bp, Human papillomavirus type 63
ttccttataaaactctggtg

SEQ ID NO: 44713 - DNA, 20 bp, Human papillomavirus type 63
tccttataaaactctggtgg

SEQ ID NO: 44714 - DNA, 20 bp, Human papillomavirus type 63
ccttataaaactctggtggg

SEQ ID NO: 44715 - DNA, 20 bp, Human papillomavirus type 63
cttataaaactctggtggga

SEQ ID NO: 44716 - DNA, 20 bp, Human papillomavirus type 63
gtctgcttgagtttatgctt

SEQ ID NO: 44717 - DNA, 20 bp, Human papillomavirus type 63
agtttatgctttattatcag

SEQ ID NO: 44718 - DNA, 20 bp, Human papillomavirus type 63
atgctttattatcaggagtc

SEQ ID NO: 44719 - DNA, 20 bp, Human papillomavirus type 63
tgctttattatcaggagtct

SEQ ID NO: 44720 - DNA, 20 bp, Human papillomavirus type 63
attatcaggagtctttcgag

SEQ ID NO: 44721 - DNA, 20 bp, Human papillomavirus type 63
ggtgagtcaagaagaaccaa

SEQ ID NO: 44722 - DNA, 20 bp, Human papillomavirus type 63
gtgagtcaagaagaaccaag

SEQ ID NO: 44723 - DNA, 20 bp, Human papillomavirus type 63
ttatgaggatatacctgctg

SEQ ID NO: 44724 - DNA, 20 bp, Human papillomavirus type 63
tgaggatatacctgctgagg

SEQ ID NO: 44725 - DNA, 20 bp, Human papillomavirus type 63
tgcttccttgtggtttgtgc

SEQ ID NO: 44726 - DNA, 20 bp, Human papillomavirus type 63
gtatattgtggatgaggcag

SEQ ID NO: 44727 - DNA, 20 bp, Human papillomavirus type 63
tggatgaggcagaatgtcgg

SEQ ID NO: 44728 - DNA, 20 bp, Human papillomavirus type 63
gaggatttggaggacaccta

SEQ ID NO: 44729 - DNA, 20 bp, Human papillomavirus type 63
ggaggacacctataattcat

SEQ ID NO: 44730 - DNA, 20 bp, Human papillomavirus type 63
gaggacacctataattcatt

SEQ ID NO: 44731 - DNA, 20 bp, Human papillomavirus type 63
aacagtcctccgcaggcaag

SEQ ID NO: 44732 - DNA, 20 bp, Human papillomavirus type 63
gaatctataacaatttcgca

SEQ ID NO: 44733 - DNA, 20 bp, Human papillomavirus type 63
ttatagattccaatctggga

SEQ ID NO: 44734 - DNA, 20 bp, Human papillomavirus type 63
tagattccaatctgggactg

SEQ ID NO: 44735 - DNA, 20 bp, Human papillomavirus type 63
caatctgggactgaggctat

SEQ ID NO: 44736 - DNA, 20 bp, Human papillomavirus type 63
tgaaatgcagtaatacaaga

SEQ ID NO: 44737 - DNA, 20 bp, Human papillomavirus type 63
gaaatgcagtaatacaagat

SEQ ID NO: 44738 - DNA, 20 bp, Human papillomavirus type 63
aaatgcagtaatacaagatc

SEQ ID NO: 44739 - DNA, 20 bp, Human papillomavirus type 63
ccaaatttaaagacacagta

SEQ ID NO: 44740 - DNA, 20 bp, Human papillomavirus type 63
aaagacacagtaggtgtcag

SEQ ID NO: 44741 - DNA, 20 bp, Human papillomavirus type 63
gaaatctttttttgaaaggt

SEQ ID NO: 44742 - DNA, 20 bp, Human papillomavirus type 63
ttttgaaaggttttggagcc

SEQ ID NO: 44743 - DNA, 20 bp, Human papillomavirus type 63
tttgaaaggttttggagcca

SEQ ID NO: 44744 - DNA, 20 bp, Human papillomavirus type 63
ttgaaaggttttggagccag

SEQ ID NO: 44745 - DNA, 20 bp, Human papillomavirus type 63
tgaaaggttttggagccagt

SEQ ID NO: 44746 - DNA, 20 bp, Human papillomavirus type 63
cagcttcccaggataaagca

SEQ ID NO: 44747 - DNA, 20 bp, Human papillomavirus type 63
ccaggataaagcaaaaacag

SEQ ID NO: 44748 - DNA, 20 bp, Human papillomavirus type 63
atcttagtggcctcagagac

SEQ ID NO: 44749 - DNA, 20 bp, Human papillomavirus type 63
tcttagtggcctcagagact

SEQ ID NO: 44750 - DNA, 20 bp, Human papillomavirus type 63
gtggcctcagagactcacaa

SEQ ID NO: 44751 - DNA, 20 bp, Human papillomavirus type 63
gcaagcgacggccctacgga

SEQ ID NO: 44752 - DNA, 20 bp, Human papillomavirus type 63
tggaccttcttcgtccgtag

SEQ ID NO: 44753 - DNA, 20 bp, Human papillomavirus type 63
ttcgtccgtagggccgtcgc

SEQ ID NO: 44754 - DNA, 20 bp, Human papillomavirus type 63
gtccgtagggccgtcgcttg

SEQ ID NO: 44755 - DNA, 20 bp, Human papillomavirus type 63
cgaacagccggcgatttcgg

SEQ ID NO: 44756 - DNA, 20 bp, Human papillomavirus type 63
gacggttcctaagggtgggt

SEQ ID NO: 44757 - DNA, 20 bp, Human papillomavirus type 63
acggttcctaagggtgggtg

SEQ ID NO: 44758 - DNA, 20 bp, Human papillomavirus type 63
ctaagggtgggtgttggggt

SEQ ID NO: 44759 - DNA, 20 bp, Human papillomavirus type 63
gggtatattttgtaatcatg

SEQ ID NO: 44760 - DNA, 20 bp, Human papillomavirus type 63
tgtaatcatgttaagagtac

SEQ ID NO: 44761 - DNA, 20 bp, Human papillomavirus type 63
atattccacaagaaagtcct

SEQ ID NO: 44762 - DNA, 20 bp, Human papillomavirus type 63
cacaagaaagtcctgctgca

SEQ ID NO: 44763 - DNA, 20 bp, Human papillomavirus type 63
ccaatacaataatcctttat

SEQ ID NO: 44764 - DNA, 20 bp, Human papillomavirus type 63
attcaggatcacagctagtg

SEQ ID NO: 44765 - DNA, 20 bp, Human papillomavirus type 63
ttcaggatcacagctagtgc

SEQ ID NO: 44766 - DNA, 20 bp, Human papillomavirus type 63
ctataatagacgctattatg

SEQ ID NO: 44767 - DNA, 20 bp, Human papillomavirus type 63
tataatagacgctattatga

SEQ ID NO: 44768 - DNA, 20 bp, Human papillomavirus type 63
tgaacaagtgccagttactg

SEQ ID NO: 44769 - DNA, 20 bp, Human papillomavirus type 63
ctgcacctgaatttatcaca

SEQ ID NO: 44770 - DNA, 20 bp, Human papillomavirus type 63
tgataaattcaggtgcagta

SEQ ID NO: 44771 - DNA, 20 bp, Human papillomavirus type 63
tatatggatattagctctat

SEQ ID NO: 44772 - DNA, 20 bp, Human papillomavirus type 63
atatggatattagctctatc

SEQ ID NO: 44773 - DNA, 20 bp, Human papillomavirus type 63
tatggatattagctctatct

SEQ ID NO: 44774 - DNA, 20 bp, Human papillomavirus type 63
gctctatctcctcaaatgat

SEQ ID NO: 44775 - DNA, 20 bp, Human papillomavirus type 63
agttacaaacactgggtgaa

SEQ ID NO: 44776 - DNA, 20 bp, Human papillomavirus type 63
tgatttacatccaagtttgc

SEQ ID NO: 44777 - DNA, 20 bp, Human papillomavirus type 63
acatccaagtttgcgtaaac

SEQ ID NO: 44778 - DNA, 20 bp, Human papillomavirus type 63
catccaagtttgcgtaaacg

SEQ ID NO: 44779 - DNA, 20 bp, Human papillomavirus type 63
gcgtaaacgtcgcaaattag

SEQ ID NO: 44780 - DNA, 20 bp, Human papillomavirus type 63
cgtaaacgtcgcaaattagt

SEQ ID NO: 44781 - DNA, 20 bp, Human papillomavirus type 63
ctccaaatcagtatagagtc

SEQ ID NO: 44782 - DNA, 20 bp, Human papillomavirus type 63
tccaaatcagtatagagtct

SEQ ID NO: 44783 - DNA, 20 bp, Human papillomavirus type 63
cgtgttagatttccagatcc

SEQ ID NO: 44784 - DNA, 20 bp, Human papillomavirus type 63
gtgttagatttccagatcct

SEQ ID NO: 44785 - DNA, 20 bp, Human papillomavirus type 63
gatttccagatcctaaccga

SEQ ID NO: 44786 - DNA, 20 bp, Human papillomavirus type 63
ctaattggctgtacaccagc

SEQ ID NO: 44787 - DNA, 20 bp, Human papillomavirus type 63
taattggctgtacaccagcc

SEQ ID NO: 44788 - DNA, 20 bp, Human papillomavirus type 63
gctgtacaccagccactggg

SEQ ID NO: 44789 - DNA, 20 bp, Human papillomavirus type 63
cagcttggagattgtcctcc

SEQ ID NO: 44790 - DNA, 20 bp, Human papillomavirus type 63
agcttggagattgtcctcct

SEQ ID NO: 44791 - DNA, 20 bp, Human papillomavirus type 63
ttgtatcaaagtggtcttgc

SEQ ID NO: 44792 - DNA, 20 bp, Human papillomavirus type 63
tgtatcaaagtggtcttgca

SEQ ID NO: 44793 - DNA, 20 bp, Human papillomavirus type 63
gtatcaaagtggtcttgcac

SEQ ID NO: 44794 - DNA, 20 bp, Human papillomavirus type 63
tatcaaagtggtcttgcaca

SEQ ID NO: 44795 - DNA, 20 bp, Human papillomavirus type 63
cacagcgttctgttccaaaa

SEQ ID NO: 44796 - DNA, 20 bp, Human papillomavirus type 63
acctgtcttcgagtcattat

SEQ ID NO: 44797 - DNA, 20 bp, Human papillomavirus type 63
cctgtcttcgagtcattatt

SEQ ID NO: 44798 - DNA, 20 bp, Human papillomavirus type 63
gagtcattattgcctagtca

SEQ ID NO: 44799 - DNA, 20 bp, Human papillomavirus type 63
ttgcctagtcatatagcctc

SEQ ID NO: 44800 - DNA, 20 bp, Human papillomavirus type 63
cctagtcatatagcctcatg

SEQ ID NO: 44801 - DNA, 20 bp, Influenza A virus
gtggaatcgggagattctac

SEQ ID NO: 44802 - DNA, 20 bp, Influenza A virus
tacatccaaatgtgcactga

SEQ ID NO: 44803 - DNA, 20 bp, Influenza A virus
ggatgtagaatctcccgatt

SEQ ID NO: 44804 - DNA, 20 bp, Influenza A virus
gatgtagaatctcccgattc

SEQ ID NO: 44805 - DNA, 20 bp, Influenza A virus
caccaatcattcttccgaca

SEQ ID NO: 44806 - DNA, 20 bp, Influenza A virus
ctggaggggtgaaaatggac

SEQ ID NO: 44807 - DNA, 20 bp, Influenza A virus
tggaggggtgaaaatggacg

SEQ ID NO: 44808 - DNA, 20 bp, Influenza A virus
cttatgaaagaatgtgcaat

SEQ ID NO: 44809 - DNA, 20 bp, Influenza A virus
tgaaagaatgtgcaatatcc

SEQ ID NO: 44810 - DNA, 20 bp, Influenza A virus
cacattctttcataagcaac

SEQ ID NO: 44811 - DNA, 20 bp, Influenza A virus
tgtgtatgggcttgcagtag

SEQ ID NO: 44812 - DNA, 20 bp, Influenza A virus
cagtagcaagtgggcatgac

SEQ ID NO: 44813 - DNA, 20 bp, Influenza A virus
gaaagggaagggtactcact

SEQ ID NO: 44814 - DNA, 20 bp, Influenza A virus
aaagggaagggtactcactg

SEQ ID NO: 44815 - DNA, 20 bp, Influenza A virus
gaatgggtctatcccgacca

SEQ ID NO: 44816 - DNA, 20 bp, Influenza A virus
caagaggaaagctttccaca

SEQ ID NO: 44817 - DNA, 20 bp, Influenza A virus
ccacaagaggggtccagatt

SEQ ID NO: 44818 - DNA, 20 bp, Influenza A virus
cacaagaggggtccagattg

SEQ ID NO: 44819 - DNA, 20 bp, Influenza A virus
cttcaaatgagaatgtggaa

SEQ ID NO: 44820 - DNA, 20 bp, Influenza A virus
aaatgagaatgtggaaacca

SEQ ID NO: 44821 - DNA, 20 bp, Influenza A virus
caaaggagacgtttttgtca

SEQ ID NO: 44822 - DNA, 20 bp, Influenza A virus
ttgtcataagagagcccttt

SEQ ID NO: 44823 - DNA, 20 bp, Influenza A virus
tgtcataagagagcccttta

SEQ ID NO: 44824 - DNA, 20 bp, Influenza A virus
gtcataagagagccctttat

SEQ ID NO: 44825 - DNA, 20 bp, Influenza A virus
tcataagagagccctttatt

SEQ ID NO: 44826 - DNA, 20 bp, Influenza A virus
caggtccagataatggagca

SEQ ID NO: 44827 - DNA, 20 bp, Influenza A virus
aggtccagataatggagcag

SEQ ID NO: 44828 - DNA, 20 bp, Influenza A virus
aaatacaacggcataataac

SEQ ID NO: 44829 - DNA, 20 bp, Influenza A virus
gaggaagaaaatattgagga

SEQ ID NO: 44830 - DNA, 20 bp, Influenza A virus
aggacacaagagtctgaatg

SEQ ID NO: 44831 - DNA, 20 bp, Influenza A virus
ctgttaccctgataccggca

SEQ ID NO: 44832 - DNA, 20 bp, Influenza A virus
ccctgataccggcaaagtga

SEQ ID NO: 44833 - DNA, 20 bp, Influenza A virus
gcatggttcgaaccggccat

SEQ ID NO: 44834 - DNA, 20 bp, Influenza A virus
gaaccggccatgggtgtctt

SEQ ID NO: 44835 - DNA, 20 bp, Influenza A virus
tgatcgaaagacacccatgg

SEQ ID NO: 44836 - DNA, 20 bp, Influenza A virus
cagacatgggtttgagatga

SEQ ID NO: 44837 - DNA, 20 bp, Influenza A virus
gagatgatttgggatcctaa

SEQ ID NO: 44838 - DNA, 20 bp, Influenza A virus
agatgatttgggatcctaat

SEQ ID NO: 44839 - DNA, 20 bp, Influenza A virus
gggatcctaatggatggaca

SEQ ID NO: 44840 - DNA, 20 bp, Influenza A virus
ggatcctaatggatggacag

SEQ ID NO: 44841 - DNA, 20 bp, Influenza A virus
ccttgaagaatcccacccag

SEQ ID NO: 44842 - DNA, 20 bp, Influenza A virus
cttgaagaatcccacccagg

SEQ ID NO: 44843 - DNA, 20 bp, Influenza A virus
aagaatcccacccagggatc

SEQ ID NO: 44844 - DNA, 20 bp, Influenza A virus
gaaaactcgtgtcttgaaac

SEQ ID NO: 44845 - DNA, 20 bp, Influenza A virus
aaaactcgtgtcttgaaacg

SEQ ID NO: 44846 - DNA, 20 bp, Influenza A virus
agcaatctggactccccgtc

SEQ ID NO: 44847 - DNA, 20 bp, Influenza A virus
gcaaatgtcgtgaggaagat

SEQ ID NO: 44848 - DNA, 20 bp, Influenza A virus
tgagttagtcatcatcttcc

SEQ ID NO: 44849 - DNA, 20 bp, Influenza A virus
gtcatcatcttcctcacgac

SEQ ID NO: 44850 - DNA, 20 bp, Influenza A virus
ctcacgacatttgccaattt

SEQ ID NO: 44851 - DNA, 20 bp, Influenza A virus
ctcctataatgttctcaaac

SEQ ID NO: 44852 - DNA, 20 bp, Influenza A virus
tcaaacaagatggcaagatt

SEQ ID NO: 44853 - DNA, 20 bp, Influenza A virus
gggaaaggatacatgttcga

SEQ ID NO: 44854 - DNA, 20 bp, Influenza A virus
gaaagtaagagcatgaagct

SEQ ID NO: 44855 - DNA, 20 bp, Influenza A virus
ctgctggtatttgtgtccgt

SEQ ID NO: 44856 - DNA, 20 bp, Influenza A virus
ggcagaagaggtacaccaaa

SEQ ID NO: 44857 - DNA, 20 bp, Influenza A virus
cgctctcatagtgaatgcac

SEQ ID NO: 44858 - DNA, 20 bp, Influenza A virus
gctctcatagtgaatgcacc

SEQ ID NO: 44859 - DNA, 20 bp, Influenza A virus
ggtgcattcactatgagagc

SEQ ID NO: 44860 - DNA, 20 bp, Influenza A virus
gtgcattcactatgagagcg

SEQ ID NO: 44861 - DNA, 20 bp, Influenza A virus
ggagtgtctgggattaatga

SEQ ID NO: 44862 - DNA, 20 bp, Influenza A virus
gagtgtctgggattaatgaa

SEQ ID NO: 44863 - DNA, 20 bp, Influenza A virus
atgaatcggctgacatgagc

SEQ ID NO: 44864 - DNA, 20 bp, Influenza A virus
gtgttacagtgataaagaac

SEQ ID NO: 44865 - DNA, 20 bp, Influenza A virus
cagtgataaagaacaatatg

SEQ ID NO: 44866 - DNA, 20 bp, Human papillomavirus 18
gaggatccaacacggcgacc

SEQ ID NO: 44867 - DNA, 20 bp, Human papillomavirus 18
aggatccaacacggcgaccc

SEQ ID NO: 44868 - DNA, 20 bp, Human papillomavirus 18
cgtgcacagatcaggtagct

SEQ ID NO: 44869 - DNA, 20 bp, Human papillomavirus 18
tagggtcgccgtgttggatc

SEQ ID NO: 44870 - DNA, 20 bp, Human papillomavirus 18
gatcctcaaagcgcgccata

SEQ ID NO: 44871 - DNA, 20 bp, Human papillomavirus 18
ttattctagaattagagaat

SEQ ID NO: 44872 - DNA, 20 bp, Human papillomavirus 18
tattctagaattagagaatt

SEQ ID NO: 44873 - DNA, 20 bp, Human papillomavirus 18
attctagaattagagaatta

SEQ ID NO: 44874 - DNA, 20 bp, Human papillomavirus 18
ttctagaattagagaattaa

SEQ ID NO: 44875 - DNA, 20 bp, Human papillomavirus 18
tagaattagagaattaagac

SEQ ID NO: 44876 - DNA, 20 bp, Human papillomavirus 18
caagacattgtattgcattt

SEQ ID NO: 44877 - DNA, 20 bp, Human papillomavirus 18
tattgcatttagagccccaa

SEQ ID NO: 44878 - DNA, 20 bp, Human papillomavirus 18
catttagagccccaaaatga

SEQ ID NO: 44879 - DNA, 20 bp, Human papillomavirus 18
agagccccaaaatgaaattc

SEQ ID NO: 44880 - DNA, 20 bp, Human papillomavirus 18
gagccccaaaatgaaattcc

SEQ ID NO: 44881 - DNA, 20 bp, Human papillomavirus 18
ttccatgcgcaggaggtcca

SEQ ID NO: 44882 - DNA, 20 bp, Human papillomavirus 18
catgcgcaggaggtccacaa

SEQ ID NO: 44883 - DNA, 20 bp, Human papillomavirus 18
catgttttaaaacgaaagtt

SEQ ID NO: 44884 - DNA, 20 bp, Human papillomavirus 18
taaaacgaaagtttgcagga

SEQ ID NO: 44885 - DNA, 20 bp, Human papillomavirus 18
aaaacgaaagtttgcaggag

SEQ ID NO: 44886 - DNA, 20 bp, Human papillomavirus 18
aggtaactacaaatggcgaa

SEQ ID NO: 44887 - DNA, 20 bp, Human papillomavirus 18
ttgccctctgtgcccccgtt

SEQ ID NO: 44888 - DNA, 20 bp, Human papillomavirus 18
ccctctgtgcccccgttgtc

SEQ ID NO: 44889 - DNA, 20 bp, Human papillomavirus 18
tctatagcctccgtactgcc

SEQ ID NO: 44890 - DNA, 20 bp, Human papillomavirus 18
ccgccatgttcgccatttgt

SEQ ID NO: 44891 - DNA, 20 bp, Human papillomavirus 18
taggcgagcccaaaaacgac

SEQ ID NO: 44892 - DNA, 20 bp, Human papillomavirus 18
agatgttcaaaaatagatga

SEQ ID NO: 44893 - DNA, 20 bp, Human papillomavirus 18
gatgttcaaaaatagatgaa

SEQ ID NO: 44894 - DNA, 20 bp, Human papillomavirus 18
aaaaatagatgaagggggag

SEQ ID NO: 44895 - DNA, 20 bp, Human papillomavirus 18
gagaccaatagtgcaattcc

SEQ ID NO: 44896 - DNA, 20 bp, Human papillomavirus 18
gcaactaatacgttgggaaa

SEQ ID NO: 44897 - DNA, 20 bp, Human papillomavirus 18
ggaaaatgcaatattctttg

SEQ ID NO: 44898 - DNA, 20 bp, Human papillomavirus 18
tttgcagcaagggaacatgg

SEQ ID NO: 44899 - DNA, 20 bp, Human papillomavirus 18
gcagcaagggaacatggcat

SEQ ID NO: 44900 - DNA, 20 bp, Human papillomavirus 18
cagcaagggaacatggcata

SEQ ID NO: 44901 - DNA, 20 bp, Human papillomavirus 18
tatgactgatgcaggaacat

SEQ ID NO: 44902 - DNA, 20 bp, Human papillomavirus 18
acataatacaatcccctgtg

SEQ ID NO: 44903 - DNA, 20 bp, Human papillomavirus 18
cataatacaatcccctgtga

SEQ ID NO: 44904 - DNA, 20 bp, Human papillomavirus 18
cacaggtagcggttttgtcc

SEQ ID NO: 44905 - DNA, 20 bp, Human papillomavirus 18
tgtcccatgttcctgcatca

SEQ ID NO: 44906 - DNA, 20 bp, Human papillomavirus 18
ttaaacagctacagcacacc

SEQ ID NO: 44907 - DNA, 20 bp, Human papillomavirus 18
aacagctacagcacaccccc

SEQ ID NO: 44908 - DNA, 20 bp, Human papillomavirus 18
cagcaccgtgtccgtgggca

SEQ ID NO: 44909 - DNA, 20 bp, Human papillomavirus 18
gcggtgcccacggacacggt

SEQ ID NO: 44910 - DNA, 20 bp, Human papillomavirus 18
cggtgcccacggacacggtg

SEQ ID NO: 44911 - DNA, 20 bp, Human papillomavirus 18
cgaaaacatagcgaccacta

SEQ ID NO: 44912 - DNA, 20 bp, Human papillomavirus 18
gacaggtgcaggcaatgaaa

SEQ ID NO: 44913 - DNA, 20 bp, Human papillomavirus 18
cagtcagtattcctgttttt

SEQ ID NO: 44914 - DNA, 20 bp, Human papillomavirus 18
ctgttttttcattgcctgca

SEQ ID NO: 44915 - DNA, 20 bp, Human papillomavirus 18
tttcattgcctgcacctgtc

SEQ ID NO: 44916 - DNA, 20 bp, Human papillomavirus 18
tgccatctgtctgtatgtgt

SEQ ID NO: 44917 - DNA, 20 bp, Human papillomavirus 18
gccatctgtctgtatgtgtg

SEQ ID NO: 44918 - DNA, 20 bp, Human papillomavirus 18
ccatctgtctgtatgtgtgc

SEQ ID NO: 44919 - DNA, 20 bp, Human papillomavirus 18
gtatttgtgtatattgtggt

SEQ ID NO: 44920 - DNA, 20 bp, Human papillomavirus 18
gtgtatattgtggtaataac

SEQ ID NO: 44921 - DNA, 20 bp, Human papillomavirus 18
gagcctgtggacactacatt

SEQ ID NO: 44922 - DNA, 20 bp, Human papillomavirus 18
agcctgtggacactacatta

SEQ ID NO: 44923 - DNA, 20 bp, Human papillomavirus 18
acatttgatcctcgtagtga

SEQ ID NO: 44924 - DNA, 20 bp, Human papillomavirus 18
gatcctcgtagtgatgttcc

SEQ ID NO: 44925 - DNA, 20 bp, Human papillomavirus 18
atcctcgtagtgatgttcct

SEQ ID NO: 44926 - DNA, 20 bp, Human papillomavirus 18
tttgatatatatgcagatga

SEQ ID NO: 44927 - DNA, 20 bp, Human papillomavirus 18
gatatatatgcagatgacat

SEQ ID NO: 44928 - DNA, 20 bp, Human papillomavirus 18
atatatatgcagatgacatg

SEQ ID NO: 44929 - DNA, 20 bp, Human papillomavirus 18
tactacctcctttgcatttt

SEQ ID NO: 44930 - DNA, 20 bp, Human papillomavirus 18
aaaaaatgcaaaggaggtag

SEQ ID NO: 44931 - DNA, 20 bp, Human papillomavirus 18
taagcagacacagttatgta

SEQ ID NO: 44932 - DNA, 20 bp, Human papillomavirus 18
tgtattttgggctgtgcccc

SEQ ID NO: 44933 - DNA, 20 bp, Human papillomavirus 18
tgggctgtgcccctgctatt

SEQ ID NO: 44934 - DNA, 20 bp, Human papillomavirus 18
gggctgtgcccctgctattg

SEQ ID NO: 44935 - DNA, 20 bp, Human papillomavirus 18
ggctgtgcccctgctattgg

SEQ ID NO: 44936 - DNA, 20 bp, Human papillomavirus 18
cttacggcgtgagcagcttt

SEQ ID NO: 44937 - DNA, 20 bp, Human papillomavirus 18
cggcgtgagcagctttttgc

SEQ ID NO: 44938 - DNA, 20 bp, Human papillomavirus 18
ttgctaggcatttttggaat

SEQ ID NO: 44939 - DNA, 20 bp, Human papillomavirus 18
tgctaggcatttttggaata

SEQ ID NO: 44940 - DNA, 20 bp, Human papillomavirus 18
gctaggcatttttggaatag

SEQ ID NO: 44941 - DNA, 20 bp, Human papillomavirus 18
tttgttactgtggtagatac

SEQ ID NO: 44942 - DNA, 20 bp, Human papillomavirus 18
gttactgtggtagataccac

SEQ ID NO: 44943 - DNA, 20 bp, Human papillomavirus 18
ttactgtggtagataccact

SEQ ID NO: 44944 - DNA, 20 bp, Human papillomavirus 18
ctgtggtagataccactccc

SEQ ID NO: 44945 - DNA, 20 bp, Human papillomavirus 18
aacaatatgtgcttctacac

SEQ ID NO: 44946 - DNA, 20 bp, Human papillomavirus 18
cttgttgggctatatattgt

SEQ ID NO: 44947 - DNA, 20 bp, Human papillomavirus 18
ttgggctatatattgtcctg

SEQ ID NO: 44948 - DNA, 20 bp, Human papillomavirus 18
ggctatatattgtcctgtat

SEQ ID NO: 44949 - DNA, 20 bp, Human papillomavirus 18
tcctgtatttcaagttataa

SEQ ID NO: 44950 - DNA, 20 bp, Human papillomavirus 18
caagttataaaactgcacac

SEQ ID NO: 44951 - DNA, 20 bp, Influenza A virus
cttttcttaaaagtgccagc

SEQ ID NO: 44952 - DNA, 20 bp, Influenza A virus
tcttaaaagtgccagcacaa

SEQ ID NO: 44953 - DNA, 20 bp, Influenza A virus
cttaaaagtgccagcacaaa

SEQ ID NO: 44954 - DNA, 20 bp, Influenza A virus
ttaaaagtgccagcacaaaa

SEQ ID NO: 44955 - DNA, 20 bp, Influenza A virus
aaagtgccagcacaaaatgc

SEQ ID NO: 44956 - DNA, 20 bp, Influenza A virus
ccttgaggaatcccatcctg

SEQ ID NO: 44957 - DNA, 20 bp, Influenza A virus
cttgaggaatcccatcctgg

SEQ ID NO: 44958 - DNA, 20 bp, Influenza A virus
aggaatcccatcctggtatt

SEQ ID NO: 44959 - DNA, 20 bp, Influenza A virus
ttgaaaactcgtgtattgaa

SEQ ID NO: 44960 - DNA, 20 bp, Influenza A virus
tgaaaactcgtgtattgaaa

SEQ ID NO: 44961 - DNA, 20 bp, Influenza A virus
aacaatcagggttgccagtt

SEQ ID NO: 44962 - DNA, 20 bp, Influenza A virus
ccagttggaggcaatgagaa

SEQ ID NO: 44963 - DNA, 20 bp, Influenza A virus
gaggcaatgagaagaaagca

SEQ ID NO: 44964 - DNA, 20 bp, Influenza A virus
gcaaatgttgtaaggaagat

SEQ ID NO: 44965 - DNA, 20 bp, Influenza A virus
taaggaagatgatgaccaat

SEQ ID NO: 44966 - DNA, 20 bp, Influenza A virus
gacaaaagagatacaccaag

SEQ ID NO: 44967 - DNA, 20 bp, Influenza A virus
ctggtgggatggtcttcaat

SEQ ID NO: 44968 - DNA, 20 bp, Influenza A virus
aatcctctgacgattttgct

SEQ ID NO: 44969 - DNA, 20 bp, Influenza A virus
tgctctgattgtgaatgcac

SEQ ID NO: 44970 - DNA, 20 bp, Influenza A virus
gctctgattgtgaatgcacc

SEQ ID NO: 44971 - DNA, 20 bp, Influenza A virus
ccagttttggtgtgtctggg

SEQ ID NO: 44972 - DNA, 20 bp, Influenza A virus
tggtgtgtctgggagcaacg

SEQ ID NO: 44973 - DNA, 20 bp, Influenza A virus
ggtgtgtctgggagcaacga

SEQ ID NO: 44974 - DNA, 20 bp, Influenza A virus
gtgtgtctgggagcaacgag

SEQ ID NO: 44975 - DNA, 20 bp, Influenza A virus
gagttactgtcatcaaaaac

SEQ ID NO: 44976 - DNA, 20 bp, Influenza A virus
aagatgaacaaatgtaccaa

SEQ ID NO: 44977 - DNA, 20 bp, Influenza A virus
atttgaaaaattcttcccca

SEQ ID NO: 44978 - DNA, 20 bp, Influenza A virus
tttgaaaaattcttccccag

SEQ ID NO: 44979 - DNA, 20 bp, Influenza A virus
gaaaaattcttccccagcag

SEQ ID NO: 44980 - DNA, 20 bp, Influenza A virus
aaaaattcttccccagcagt

SEQ ID NO: 44981 - DNA, 20 bp, Hepatitis GB virus A
gggttcgtaggtggtaaatc

SEQ ID NO: 44982 - DNA, 20 bp, Hepatitis GB virus A
gtaggtggtaaatcccagca

SEQ ID NO: 44983 - DNA, 20 bp, Hepatitis GB virus A
ccacctgtgctgggatttac

SEQ ID NO: 44984 - DNA, 20 bp, Hepatitis GB virus A
accacctacgaaccctaaca

SEQ ID NO: 44985 - DNA, 20 bp, Hepatitis GB virus A
ccacctacgaaccctaacac

SEQ ID NO: 44986 - DNA, 20 bp, Hepatitis GB virus A
acaatgccagtggggggccg

SEQ ID NO: 44987 - DNA, 20 bp, Hepatitis GB virus A
ttgtgggctccgagttcctc

SEQ ID NO: 44988 - DNA, 20 bp, Hepatitis GB virus A
tgggctccgagttcctctag

SEQ ID NO: 44989 - DNA, 20 bp, Hepatitis GB virus A
ctctagggatggccgaaagg

SEQ ID NO: 44990 - DNA, 20 bp, Hepatitis GB virus A
cggccatccctagaggaact

SEQ ID NO: 44991 - DNA, 20 bp, Hepatitis GB virus A
ttgggaagtttggcggagcc

SEQ ID NO: 44992 - DNA, 20 bp, Hepatitis GB virus A
ggaagtttggcggagcctta

SEQ ID NO: 44993 - DNA, 20 bp, Hepatitis GB virus A
ggcggagccttaggcccggt

SEQ ID NO: 44994 - DNA, 20 bp, Hepatitis GB virus A
gcggagccttaggcccggtg

SEQ ID NO: 44995 - DNA, 20 bp, Hepatitis GB virus A
ggcccggtggcctcagctgc

SEQ ID NO: 44996 - DNA, 20 bp, Hepatitis GB virus A
cctactacttttagtggtgg

SEQ ID NO: 44997 - DNA, 20 bp, Hepatitis GB virus A
ctactacttttagtggtggg

SEQ ID NO: 44998 - DNA, 20 bp, Hepatitis GB virus A
tagtggtgggcgaggcacag

SEQ ID NO: 44999 - DNA, 20 bp, Hepatitis GB virus A
agtggtgggcgaggcacagg

SEQ ID NO: 45000 - DNA, 20 bp, Hepatitis GB virus A
gtggtgggcgaggcacaggg

SEQ ID NO: 45001 - DNA, 20 bp, Hepatitis GB virus A
ttggcacagtgtcggccgtt

SEQ ID NO: 45002 - DNA, 20 bp, Hepatitis GB virus A
gcacagtgtcggccgtttgc

SEQ ID NO: 45003 - DNA, 20 bp, Hepatitis GB virus A
gccagtggggctccgcgtac

SEQ ID NO: 45004 - DNA, 20 bp, Hepatitis GB virus A
ccagtggggctccgcgtact

SEQ ID NO: 45005 - DNA, 20 bp, Hepatitis GB virus A
ggcgactgggtgccattgta

SEQ ID NO: 45006 - DNA, 20 bp, Hepatitis GB virus A
tatggtgcagttaagaagct

SEQ ID NO: 45007 - DNA, 20 bp, Hepatitis GB virus A
atggtgcagttaagaagctt

SEQ ID NO: 45008 - DNA, 20 bp, Hepatitis GB virus A
tggtgcagttaagaagcttg

SEQ ID NO: 45009 - DNA, 20 bp, Hepatitis GB virus A
agaagcttggggtcaacatg

SEQ ID NO: 45010 - DNA, 20 bp, Hepatitis GB virus A
gggtcaacatgactgtgagc

SEQ ID NO: 45011 - DNA, 20 bp, Hepatitis GB virus A
gcttttgacttcccgggaga

SEQ ID NO: 45012 - DNA, 20 bp, Hepatitis GB virus A
tgacttcccgggagatcaca

SEQ ID NO: 45013 - DNA, 20 bp, Hepatitis GB virus A
gacttcccgggagatcacaa

SEQ ID NO: 45014 - DNA, 20 bp, Hepatitis GB virus A
acttcccgggagatcacaat

SEQ ID NO: 45015 - DNA, 20 bp, Hepatitis GB virus A
ccgggagatcacaatggatt

SEQ ID NO: 45016 - DNA, 20 bp, Hepatitis GB virus A
gccctgcccgaactcgacca

SEQ ID NO: 45017 - DNA, 20 bp, Hepatitis GB virus A
ccctgcccgaactcgaccac

SEQ ID NO: 45018 - DNA, 20 bp, Hepatitis GB virus A
ggtgattcagtcagtaacgc

SEQ ID NO: 45019 - DNA, 20 bp, Hepatitis GB virus A
agtcagtaacgccgcctgct

SEQ ID NO: 45020 - DNA, 20 bp, Hepatitis GB virus A
gctggttccgacttgtggct

SEQ ID NO: 45021 - DNA, 20 bp, Hepatitis GB virus A
tgtggtcgcttaccttgggg

SEQ ID NO: 45022 - DNA, 20 bp, Hepatitis GB virus A
ccttggggttctcggcactg

SEQ ID NO: 45023 - DNA, 20 bp, Hepatitis GB virus A
gggttctcggcactgccaga

SEQ ID NO: 45024 - DNA, 20 bp, Hepatitis GB virus A
tcggcactgccagatgctgc

SEQ ID NO: 45025 - DNA, 20 bp, Hepatitis GB virus A
gcaagaggtgcgctgcccct

SEQ ID NO: 45026 - DNA, 20 bp, Hepatitis GB virus A
gcctgcgcctgttggacact

SEQ ID NO: 45027 - DNA, 20 bp, Hepatitis GB virus A
gacactcccataggcaaccg

SEQ ID NO: 45028 - DNA, 20 bp, Hepatitis GB virus A
gtgcaaactgtggctggtgg

SEQ ID NO: 45029 - DNA, 20 bp, Hepatitis GB virus A
tgcaaactgtggctggtggc

SEQ ID NO: 45030 - DNA, 20 bp, Hepatitis GB virus A
gcacaaaggccggcgggggc

SEQ ID NO: 45031 - DNA, 20 bp, Hepatitis GB virus A
cgggaatggggttttgccct

SEQ ID NO: 45032 - DNA, 20 bp, Hepatitis GB virus A
tgccctagagcccgtcgctg

SEQ ID NO: 45033 - DNA, 20 bp, Hepatitis GB virus A
gccctagagcccgtcgctgt

SEQ ID NO: 45034 - DNA, 20 bp, Hepatitis GB virus A
ccctagagcccgtcgctgtg

SEQ ID NO: 45035 - DNA, 20 bp, Hepatitis GB virus A
gggatgccgcacgagtgttg

SEQ ID NO: 45036 - DNA, 20 bp, Hepatitis GB virus A
ccaatgggggctacctgctt

SEQ ID NO: 45037 - DNA, 20 bp, Hepatitis GB virus A
gaaccttgcaaatgctcacc

SEQ ID NO: 45038 - DNA, 20 bp, Hepatitis GB virus A
caaatgctcaccgcagggcg

SEQ ID NO: 45039 - DNA, 20 bp, Hepatitis GB virus A
gcaaggttccaagcaggtag

SEQ ID NO: 45040 - DNA, 20 bp, Hepatitis GB virus A
caaggttccaagcaggtagc

SEQ ID NO: 45041 - DNA, 20 bp, Hepatitis GB virus A
gcgtattgcatcgtggcaat

SEQ ID NO: 45042 - DNA, 20 bp, Hepatitis GB virus A
catcgtggcaatcgggtcac

SEQ ID NO: 45043 - DNA, 20 bp, Hepatitis GB virus A
ggagaccctccctagggagg

SEQ ID NO: 45044 - DNA, 20 bp, Hepatitis GB virus A
gtctgagcctccctagggag

SEQ ID NO: 45045 - DNA, 20 bp, Hepatitis GB virus A
gtatagcgtatcccagtgac

SEQ ID NO: 45046 - DNA, 20 bp, Hepatitis GB virus A
gtgttctgggcatgggacgt

SEQ ID NO: 45047 - DNA, 20 bp, Hepatitis GB virus A
tgggcatgggacgtgcccgg

SEQ ID NO: 45048 - DNA, 20 bp, Hepatitis GB virus A
ctggcgaaagaatgtcgggt

SEQ ID NO: 45049 - DNA, 20 bp, Hepatitis GB virus A
tttcgccagcaaccgggcac

SEQ ID NO: 45050 - DNA, 20 bp, Hepatitis GB virus A
cgccagcaaccgggcacgtc

SEQ ID NO: 45051 - DNA, 20 bp, Hepatitis GB virus A
tctgccactcaaaggttgag

SEQ ID NO: 45052 - DNA, 20 bp, Hepatitis GB virus A
ctgccactcaaaggttgagt

SEQ ID NO: 45053 - DNA, 20 bp, Hepatitis GB virus A
tgccactcaaaggttgagtg

SEQ ID NO: 45054 - DNA, 20 bp, Hepatitis GB virus A
agtgcgagaggacgtgcgca

SEQ ID NO: 45055 - DNA, 20 bp, Hepatitis GB virus A
ctacaggggcagggaaacag

SEQ ID NO: 45056 - DNA, 20 bp, Hepatitis GB virus A
ttactcaggtgggggggcca

SEQ ID NO: 45057 - DNA, 20 bp, Hepatitis GB virus A
ctcaggtgggggggccaact

SEQ ID NO: 45058 - DNA, 20 bp, Hepatitis GB virus A
gtgtgrccgagggttayacc

SEQ ID NO: 45059 - DNA, 20 bp, Hepatitis GB virus A
cggtagttggcccccccacc

SEQ ID NO: 45060 - DNA, 20 bp, Hepatitis GB virus A
gcccccccacctgagtaata

SEQ ID NO: 45061 - DNA, 20 bp, Hepatitis GB virus A
tccagttgtagtggtycccc

SEQ ID NO: 45062 - DNA, 20 bp, Hepatitis GB virus A
tagtggtycccccctgtgag

SEQ ID NO: 45063 - DNA, 20 bp, Hepatitis GB virus A
cgccaccggcttcacatcac

SEQ ID NO: 45064 - DNA, 20 bp, Hepatitis GB virus A
acatcacaggggtagcgctc

SEQ ID NO: 45065 - DNA, 20 bp, Hepatitis GB virus A
cctgctgggaatgtcagccg

SEQ ID NO: 45066 - DNA, 20 bp, Hepatitis GB virus A
ctgctgggaatgtcagccgg

SEQ ID NO: 45067 - DNA, 20 bp, Hepatitis GB virus A
ccagcaggaaagaggccgcc

SEQ ID NO: 45068 - DNA, 20 bp, Hepatitis GB virus A
ctcttagccccataggcagc

SEQ ID NO: 45069 - DNA, 20 bp, Hepatitis GB virus A
gccccataggcagctgtgya

SEQ ID NO: 45070 - DNA, 20 bp, Hepatitis GB virus A
tactctggagtgtcaagaag

SEQ ID NO: 45071 - DNA, 20 bp, Hepatitis GB virus A
ttgacactccagagtagaac

SEQ ID NO: 45072 - DNA, 20 bp, Hepatitis GB virus A
acactccagagtagaacgcc

SEQ ID NO: 45073 - DNA, 20 bp, Hepatitis GB virus A
aggaagatcaaaacaacctt

SEQ ID NO: 45074 - DNA, 20 bp, Hepatitis GB virus A
ccgcgcctcaaaatccctct

SEQ ID NO: 45075 - DNA, 20 bp, Hepatitis GB virus A
ccttcccagggtccggccca

SEQ ID NO: 45076 - DNA, 20 bp, Hepatitis GB virus A
ccagggtccggcccatcctt

SEQ ID NO: 45077 - DNA, 20 bp, Hepatitis GB virus A
gctgcaccccatcagaggga

SEQ ID NO: 45078 - DNA, 20 bp, Hepatitis GB virus A
aggcgttggtggtctctggc

SEQ ID NO: 45079 - DNA, 20 bp, Hepatitis GB virus A
gtggtctctggcacggttac

SEQ ID NO: 45080 - DNA, 20 bp, Hepatitis GB virus A
cggtgacggcgtctagcgcc

SEQ ID NO: 45081 - DNA, 20 bp, Hepatitis GB virus A
aacagcccgcctcacctcgg

SEQ ID NO: 45082 - DNA, 20 bp, Hepatitis GB virus A
acagcccgcctcacctcggc

SEQ ID NO: 45083 - DNA, 20 bp, Hepatitis GB virus A
caggctctggaggatgctgc

SEQ ID NO: 45084 - DNA, 20 bp, Hepatitis GB virus A
tgacaggcacatggggcagt

SEQ ID NO: 45085 - DNA, 20 bp, Hepatitis GB virus A
cgcagcctcttggctaggga

SEQ ID NO: 45086 - DNA, 20 bp, Hepatitis GB virus A
ccacccccctgacagacaca

SEQ ID NO: 45087 - DNA, 20 bp, Hepatitis GB virus A
agctggtgtgcaggagagaa

SEQ ID NO: 45088 - DNA, 20 bp, Hepatitis GB virus A
ccccgaccagacgtatgagt

SEQ ID NO: 45089 - DNA, 20 bp, Hepatitis GB virus A
tctcctgcacaccagctcaa

SEQ ID NO: 45090 - DNA, 20 bp, Hepatitis GB virus A
ctttgattcgtcaatcgacg

SEQ ID NO: 45091 - DNA, 20 bp, Hepatitis GB virus A
gattcgtcaatcgacgaaca

SEQ ID NO: 45092 - DNA, 20 bp, Hepatitis GB virus A
attcgtcaatcgacgaacat

SEQ ID NO: 45093 - DNA, 20 bp, Hepatitis GB virus A
gtcaatcgacgaacatgaca

SEQ ID NO: 45094 - DNA, 20 bp, Hepatitis GB virus A
gcggccgctagtgacgaccc

SEQ ID NO: 45095 - DNA, 20 bp, Hepatitis GB virus A
caggtgtgaccctgtcaagc

SEQ ID NO: 45096 - DNA, 20 bp, Hepatitis GB virus A
ggatacagctgagtgttgct

SEQ ID NO: 45097 - DNA, 20 bp, Hepatitis GB virus A
gatacagctgagtgttgctc

SEQ ID NO: 45098 - DNA, 20 bp, Hepatitis GB virus A
ctcggcctacttggctgaat

SEQ ID NO: 45099 - DNA, 20 bp, Hepatitis GB virus A
gctgaatgtgttgctggggg

SEQ ID NO: 45100 - DNA, 20 bp, Hepatitis GB virus A
cgcacgtgttgatcatggca

SEQ ID NO: 45101 - DNA, 20 bp, Hepatitis GB virus A
atcatggcataccgaagtgg

SEQ ID NO: 45102 - DNA, 20 bp, Hepatitis GB virus A
atcaccggatgagttggtga

SEQ ID NO: 45103 - DNA, 20 bp, Hepatitis GB virus A
gtgatgtgccaggtccaagg

SEQ ID NO: 45104 - DNA, 20 bp, Hepatitis GB virus A
ccttggacctggcacatcac

SEQ ID NO: 45105 - DNA, 20 bp, Human papillomavirus type 5
ggcatccctgtgattgattg

SEQ ID NO: 45106 - DNA, 20 bp, Human papillomavirus type 5
attgtttaataccttgcaat

SEQ ID NO: 45107 - DNA, 20 bp, Human papillomavirus type 5
tttaataccttgcaatttct

SEQ ID NO: 45108 - DNA, 20 bp, Human papillomavirus type 5
aataccttgcaatttctgtg

SEQ ID NO: 45109 - DNA, 20 bp, Human papillomavirus type 5
ataccttgcaatttctgtgg

SEQ ID NO: 45110 - DNA, 20 bp, Human papillomavirus type 5
cctttcataaggtgaggaac

SEQ ID NO: 45111 - DNA, 20 bp, Human papillomavirus type 5
cataaggtgaggaacgcctg

SEQ ID NO: 45112 - DNA, 20 bp, Human papillomavirus type 5
ataaggtgaggaacgcctgg

SEQ ID NO: 45113 - DNA, 20 bp, Human papillomavirus type 5
ttatcatgattggtaaagag

SEQ ID NO: 45114 - DNA, 20 bp, Human papillomavirus type 5
tatcatgattggtaaagagg

SEQ ID NO: 45115 - DNA, 20 bp, Human papillomavirus type 5
gttagatgatactgaactgg

SEQ ID NO: 45116 - DNA, 20 bp, Human papillomavirus type 5
ttagatgatactgaactgga

SEQ ID NO: 45117 - DNA, 20 bp, Human papillomavirus type 5
gatgatactgaactggagca

SEQ ID NO: 45118 - DNA, 20 bp, Human papillomavirus type 5
cctggaactatttcatcaac

SEQ ID NO: 45119 - DNA, 20 bp, Human papillomavirus type 5
catcaacaggagtgtgagca

SEQ ID NO: 45120 - DNA, 20 bp, Human papillomavirus type 5
actctcggccggatgacgag

SEQ ID NO: 45121 - DNA, 20 bp, Human papillomavirus type 5
aggggacgtagatatacatt

SEQ ID NO: 45122 - DNA, 20 bp, Human papillomavirus type 5
cactgcattgttgcgttcta

SEQ ID NO: 45123 - DNA, 20 bp, Human papillomavirus type 5
ttgcgttctagcaacaaaaa

SEQ ID NO: 45124 - DNA, 20 bp, Human papillomavirus type 5
cgttctagcaacaaaaaagc

SEQ ID NO: 45125 - DNA, 20 bp, Human papillomavirus type 5
caacagcattgtgactatat

SEQ ID NO: 45126 - DNA, 20 bp, Human papillomavirus type 5
tgactatatctgggtccgtg

SEQ ID NO: 45127 - DNA, 20 bp, Human papillomavirus type 5
tacctattgtgttttaaggc

SEQ ID NO: 45128 - DNA, 20 bp, Human papillomavirus type 5
tgttttaaggcgggaaaaaa

SEQ ID NO: 45129 - DNA, 20 bp, Human papillomavirus type 5
tttcccgccttaaaacacaa

SEQ ID NO: 45130 - DNA, 20 bp, Human papillomavirus type 5
cataatcacttattagacga

SEQ ID NO: 45131 - DNA, 20 bp, Human papillomavirus type 5
ataatcacttattagacgaa

SEQ ID NO: 45132 - DNA, 20 bp, Human papillomavirus type 5
ttagacgaagcagatatagc

SEQ ID NO: 45133 - DNA, 20 bp, Human papillomavirus type 5
gacgaagcagatatagcata

SEQ ID NO: 45134 - DNA, 20 bp, Human papillomavirus type 5
ctcccgaagacgcgaatgca

SEQ ID NO: 45135 - DNA, 20 bp, Human papillomavirus type 5
tggaaagtcatcatttgcaa

SEQ ID NO: 45136 - DNA, 20 bp, Human papillomavirus type 5
gcaatgtcattaataagagt

SEQ ID NO: 45137 - DNA, 20 bp, Human papillomavirus type 5
caatgtcattaataagagtg

SEQ ID NO: 45138 - DNA, 20 bp, Human papillomavirus type 5
ataagagtgttgaagggtag

SEQ ID NO: 45139 - DNA, 20 bp, Human papillomavirus type 5
aagggtagagtgttgtcatt

SEQ ID NO: 45140 - DNA, 20 bp, Human papillomavirus type 5
gaactaactgaccaaagctg

SEQ ID NO: 45141 - DNA, 20 bp, Human papillomavirus type 5
ttttacaaggctttggacac

SEQ ID NO: 45142 - DNA, 20 bp, Human papillomavirus type 5
tttacaaggctttggacaca

SEQ ID NO: 45143 - DNA, 20 bp, Human papillomavirus type 5
ttacaaggctttggacacaa

SEQ ID NO: 45144 - DNA, 20 bp, Human papillomavirus type 5
tacaaggctttggacacaat

SEQ ID NO: 45145 - DNA, 20 bp, Human papillomavirus type 5
actccacgtccagacagctc

SEQ ID NO: 45146 - DNA, 20 bp, Human papillomavirus type 5
tgatgtggtgagctgtctgg

SEQ ID NO: 45147 - DNA, 20 bp, Human papillomavirus type 5
gatgtggtgagctgtctgga

SEQ ID NO: 45148 - DNA, 20 bp, Human papillomavirus type 5
atgtggtgagctgtctggac

SEQ ID NO: 45149 - DNA, 20 bp, Human papillomavirus type 5
tggaggtggtgggggtcgcg

SEQ ID NO: 45150 - DNA, 20 bp, Human papillomavirus type 5
atcgccgcctgggtgacctt

SEQ ID NO: 45151 - DNA, 20 bp, Human papillomavirus type 5
cacctccccttctgcaggtg

SEQ ID NO: 45152 - DNA, 20 bp, Human papillomavirus type 5
tgcaggtggttggggacctt

SEQ ID NO: 45153 - DNA, 20 bp, Human papillomavirus type 5
gggaccttcctctggatcgc

SEQ ID NO: 45154 - DNA, 20 bp, Human papillomavirus type 5
gttcaaagcatacaggacga

SEQ ID NO: 45155 - DNA, 20 bp, Human papillomavirus type 5
aaagcatacaggacgacttg

SEQ ID NO: 45156 - DNA, 20 bp, Human papillomavirus type 5
gaagattactggaagaagct

SEQ ID NO: 45157 - DNA, 20 bp, Human papillomavirus type 5
ctggaagaagctcgcgaccc

SEQ ID NO: 45158 - DNA, 20 bp, Human papillomavirus type 5
tcaaaggggcggctaacaca

SEQ ID NO: 45159 - DNA, 20 bp, Human papillomavirus type 5
ataaggcctatggcaacctg

SEQ ID NO: 45160 - DNA, 20 bp, Human papillomavirus type 5
aacatttactaatgctgctt

SEQ ID NO: 45161 - DNA, 20 bp, Human papillomavirus type 5
acatttactaatgctgcttt

SEQ ID NO: 45162 - DNA, 20 bp, Human papillomavirus type 5
actaatgctgcttttgctac

SEQ ID NO: 45163 - DNA, 20 bp, Human papillomavirus type 5
ctaatgctgcttttgctact

SEQ ID NO: 45164 - DNA, 20 bp, Human papillomavirus type 5
acttccaggtgaagtagaaa

SEQ ID NO: 45165 - DNA, 20 bp, Human papillomavirus type 5
cttccaggtgaagtagaaac

SEQ ID NO: 45166 - DNA, 20 bp, Human papillomavirus type 5
caggtgaagtagaaacaatt

SEQ ID NO: 45167 - DNA, 20 bp, Human papillomavirus type 5
ctgaaatccatcctgtacct

SEQ ID NO: 45168 - DNA, 20 bp, Human papillomavirus type 5
ccactagcacaggttccagt

SEQ ID NO: 45169 - DNA, 20 bp, Human papillomavirus type 5
ttgaggaagaagtgactaat

SEQ ID NO: 45170 - DNA, 20 bp, Human papillomavirus type 5
tgaggaagaagtgactaata

SEQ ID NO: 45171 - DNA, 20 bp, Human papillomavirus type 5
gaggaagaagtgactaatat

SEQ ID NO: 45172 - DNA, 20 bp, Human papillomavirus type 5
aggaagaagtgactaatata

SEQ ID NO: 45173 - DNA, 20 bp, Human papillomavirus type 5
gaaaatgatctggatgtctt

SEQ ID NO: 45174 - DNA, 20 bp, Human papillomavirus type 5
tgttgcatatccagagtcac

SEQ ID NO: 45175 - DNA, 20 bp, Human papillomavirus type 5
catatccagagtcacgtaat

SEQ ID NO: 45176 - DNA, 20 bp, Human papillomavirus type 5
atcctacacctgatattcct

SEQ ID NO: 45177 - DNA, 20 bp, Human papillomavirus type 5
tcctacacctgatattcctg

SEQ ID NO: 45178 - DNA, 20 bp, Human papillomavirus type 5
ctgtagtcattatacaccct

SEQ ID NO: 45179 - DNA, 20 bp, Human papillomavirus type 5
tctaaagatgacagacagga

SEQ ID NO: 45180 - DNA, 20 bp, Human papillomavirus type 5
ctaaagatgacagacaggat

SEQ ID NO: 45181 - DNA, 20 bp, Human papillomavirus type 5
taaagatgacagacaggata

SEQ ID NO: 45182 - DNA, 20 bp, Human papillomavirus type 5
tgatcctaaacagatccaaa

SEQ ID NO: 45183 - DNA, 20 bp, Human papillomavirus type 5
gatcctaaacagatccaaat

SEQ ID NO: 45184 - DNA, 20 bp, Human papillomavirus type 5
catgtatttcccaactgtta

SEQ ID NO: 45185 - DNA, 20 bp, Human papillomavirus type 5
cccaactgttagtggctcat

SEQ ID NO: 45186 - DNA, 20 bp, Human papillomavirus type 5
ccaactgttagtggctcatt

SEQ ID NO: 45187 - DNA, 20 bp, Human papillomavirus type 5
gtggctcattagtatccagt

SEQ ID NO: 45188 - DNA, 20 bp, Human papillomavirus type 5
gtatccagtgatgctcaatt

SEQ ID NO: 45189 - DNA, 20 bp, Human papillomavirus type 5
acggtacaaaagcagtgtct

SEQ ID NO: 45190 - DNA, 20 bp, Human papillomavirus type 5
taaagggtctaatagaggaa

SEQ ID NO: 45191 - DNA, 20 bp, Human papillomavirus type 5
aggtctgaccgaaagtggta

SEQ ID NO: 45192 - DNA, 20 bp, Human papillomavirus type 5
ataaaaatgtaccactttcg

SEQ ID NO: 45193 - DNA, 20 bp, Human papillomavirus type 5
taaaaatgtaccactttcgg

SEQ ID NO: 45194 - DNA, 20 bp, Influenza A virus
ccatcttagcaacgactatg

SEQ ID NO: 45195 - DNA, 20 bp, Influenza A virus
gcaacgactatgacactaca

SEQ ID NO: 45196 - DNA, 20 bp, Influenza A virus
caatgaatgtaccaacccat

SEQ ID NO: 45197 - DNA, 20 bp, Influenza A virus
aatgaatgtaccaacccatc

SEQ ID NO: 45198 - DNA, 20 bp, Influenza A virus
ctattatgattggttcacat

SEQ ID NO: 45199 - DNA, 20 bp, Influenza A virus
ggctttctgcaggcggggat

SEQ ID NO: 45200 - DNA, 20 bp, Influenza A virus
ctgcaggcggggatatttgg

SEQ ID NO: 45201 - DNA, 20 bp, Influenza A virus
tgcaggcggggatatttggg

SEQ ID NO: 45202 - DNA, 20 bp, Influenza A virus
gggtgacaagagaaccttat

SEQ ID NO: 45203 - DNA, 20 bp, Influenza A virus
ggtgacaagagaaccttatg

SEQ ID NO: 45204 - DNA, 20 bp, Influenza A virus
catgtttgtgtcactgggga

SEQ ID NO: 45205 - DNA, 20 bp, Influenza A virus
gtgtcactggggatgataga

SEQ ID NO: 45206 - DNA, 20 bp, Influenza A virus
tgtcactggggatgatagaa

SEQ ID NO: 45207 - DNA, 20 bp, Influenza A virus
atgatgggatgcttaccgac

SEQ ID NO: 45208 - DNA, 20 bp, Influenza A virus
tgatgggatgcttaccgaca

SEQ ID NO: 45209 - DNA, 20 bp, Influenza A virus
cccccggtatccagaagtta

SEQ ID NO: 45210 - DNA, 20 bp, Influenza A virus
gatgtgtttgcagagacaat

SEQ ID NO: 45211 - DNA, 20 bp, Influenza A virus
gcagagacaattggaagggc

SEQ ID NO: 45212 - DNA, 20 bp, Influenza A virus
cagagacaattggaagggct

SEQ ID NO: 45213 - DNA, 20 bp, Influenza A virus
gagcccttccaattgtctct

SEQ ID NO: 45214 - DNA, 20 bp, Influenza A virus
ggatgggacgaacaatcaag

SEQ ID NO: 45215 - DNA, 20 bp, Influenza A virus
gatgggacgaacaatcaaga

SEQ ID NO: 45216 - DNA, 20 bp, Influenza A virus
gcgctctggttatgagactt

SEQ ID NO: 45217 - DNA, 20 bp, Influenza A virus
tgagactttcagggtcgttg

SEQ ID NO: 45218 - DNA, 20 bp, Influenza A virus
cagggtcgttggtggttgga

SEQ ID NO: 45219 - DNA, 20 bp, Influenza B virus
acagtataaataccggaaca

SEQ ID NO: 45220 - DNA, 20 bp, Influenza B virus
ctggcttgatgattggtctg

SEQ ID NO: 45221 - DNA, 20 bp, Influenza B virus
atgattggtctggttgcccc

SEQ ID NO: 45222 - DNA, 20 bp, Influenza B virus
gtctggttgccccactggtt

SEQ ID NO: 45223 - DNA, 20 bp, Influenza B virus
ccccactggttccgggagtc

SEQ ID NO: 45224 - DNA, 20 bp, Influenza B virus
tacaaccagatgatggtcaa

SEQ ID NO: 45225 - DNA, 20 bp, Influenza B virus
atgatgacatggaaaggaat

SEQ ID NO: 45226 - DNA, 20 bp, Influenza B virus
aaaatgcacaagctgtggag

SEQ ID NO: 45227 - DNA, 20 bp, Influenza B virus
cagccaataggattctctcc

SEQ ID NO: 45228 - DNA, 20 bp, Influenza B virus
tctccacagcttgtgcattt

SEQ ID NO: 45229 - DNA, 20 bp, Influenza B virus
cattgggaagaaaatgtttc

SEQ ID NO: 45230 - DNA, 20 bp, Influenza B virus
attgggaagaaaatgtttca

SEQ ID NO: 45231 - DNA, 20 bp, Influenza B virus
ggaagaaaatgtttcaaata

SEQ ID NO: 45232 - DNA, 20 bp, Influenza B virus
caaatatcagacaaaaacaa

SEQ ID NO: 45233 - DNA, 20 bp, Influenza B virus
aaatatcagacaaaaacaaa

SEQ ID NO: 45234 - DNA, 20 bp, Human papillomavirus type 172
caccctaagaaactatgcac

SEQ ID NO: 45235 - DNA, 20 bp, Human papillomavirus type 172
cggtcatggaatttatctct

SEQ ID NO: 45236 - DNA, 20 bp, Human papillomavirus type 172
ggtcatggaatttatctctc

SEQ ID NO: 45237 - DNA, 20 bp, Human papillomavirus type 172
atctctcctatcattgttgg

SEQ ID NO: 45238 - DNA, 20 bp, Human papillomavirus type 172
tctctcctatcattgttggc

SEQ ID NO: 45239 - DNA, 20 bp, Human papillomavirus type 172
ctgtttaattcgttgtcatt

SEQ ID NO: 45240 - DNA, 20 bp, Human papillomavirus type 172
tgtttaattcgttgtcattg

SEQ ID NO: 45241 - DNA, 20 bp, Human papillomavirus type 172
aattcgttgtcattggagaa

SEQ ID NO: 45242 - DNA, 20 bp, Human papillomavirus type 172
attcgttgtcattggagaaa

SEQ ID NO: 45243 - DNA, 20 bp, Human papillomavirus type 172
gttgtcattggagaaattgc

SEQ ID NO: 45244 - DNA, 20 bp, Human papillomavirus type 172
tagcatcaagattatcaatc

SEQ ID NO: 45245 - DNA, 20 bp, Human papillomavirus type 172
tcaatccttacatttgagca

SEQ ID NO: 45246 - DNA, 20 bp, Human papillomavirus type 172
catttgagcaattattgatt

SEQ ID NO: 45247 - DNA, 20 bp, Human papillomavirus type 172
gagcaattattgattggaga

SEQ ID NO: 45248 - DNA, 20 bp, Human papillomavirus type 172
agcaattattgattggagag

SEQ ID NO: 45249 - DNA, 20 bp, Human papillomavirus type 172
atagatgaggttgactgcag

SEQ ID NO: 45250 - DNA, 20 bp, Human papillomavirus type 172
actgcagccagggaaattcc

SEQ ID NO: 45251 - DNA, 20 bp, Human papillomavirus type 172
cctggcattgtttaatgaac

SEQ ID NO: 45252 - DNA, 20 bp, Human papillomavirus type 172
tttaatgaacatgaaacgga

SEQ ID NO: 45253 - DNA, 20 bp, Human papillomavirus type 172
aatgaacatgaaacggagga

SEQ ID NO: 45254 - DNA, 20 bp, Human papillomavirus type 172
gatttgagtcagatggttca

SEQ ID NO: 45255 - DNA, 20 bp, Human papillomavirus type 172
atttgagtcagatggttcag

SEQ ID NO: 45256 - DNA, 20 bp, Human papillomavirus type 172
gagtcagatggttcagtttt

SEQ ID NO: 45257 - DNA, 20 bp, Human papillomavirus type 172
agtcagatggttcagttttg

SEQ ID NO: 45258 - DNA, 20 bp, Human papillomavirus type 172
agttttgttatgataacaat

SEQ ID NO: 45259 - DNA, 20 bp, Human papillomavirus type 172
caaccattattggatggaaa

SEQ ID NO: 45260 - DNA, 20 bp, Human papillomavirus type 172
ttggatggaaaaatgggatt

SEQ ID NO: 45261 - DNA, 20 bp, Human papillomavirus type 172
gatggaaaaatgggatttat

SEQ ID NO: 45262 - DNA, 20 bp, Human papillomavirus type 172
atagatgatgtaacctatcc

SEQ ID NO: 45263 - DNA, 20 bp, Human papillomavirus type 172
tagatgatgtaacctatcct

SEQ ID NO: 45264 - DNA, 20 bp, Human papillomavirus type 172
ttttagaaaacttgggaatc

SEQ ID NO: 45265 - DNA, 20 bp, Human papillomavirus type 172
tttagaaaacttgggaatca

SEQ ID NO: 45266 - DNA, 20 bp, Human papillomavirus type 172
ttagaaaacttgggaatcaa

SEQ ID NO: 45267 - DNA, 20 bp, Human papillomavirus type 172
tagaaaacttgggaatcaaa

SEQ ID NO: 45268 - DNA, 20 bp, Human papillomavirus type 172
agaaaacttgggaatcaaat

SEQ ID NO: 45269 - DNA, 20 bp, Human papillomavirus type 172
ccgtaccgcaaaccccaaga

SEQ ID NO: 45270 - DNA, 20 bp, Human papillomavirus type 172
agctagctcctccctcttcg

SEQ ID NO: 45271 - DNA, 20 bp, Human papillomavirus type 172
gcctttttgtcgtcttgggg

SEQ ID NO: 45272 - DNA, 20 bp, Human papillomavirus type 172
ttgtcgtcttggggtttgcg

SEQ ID NO: 45273 - DNA, 20 bp, Human papillomavirus type 172
tgtcgtcttggggtttgcgg

SEQ ID NO: 45274 - DNA, 20 bp, Human papillomavirus type 172
taacagacaccacatcaata

SEQ ID NO: 45275 - DNA, 20 bp, Human papillomavirus type 172
caatctccagaaaatggggt

SEQ ID NO: 45276 - DNA, 20 bp, Human papillomavirus type 172
aatctccagaaaatggggtt

SEQ ID NO: 45277 - DNA, 20 bp, Human papillomavirus type 172
caattttaaatgttacacct

SEQ ID NO: 45278 - DNA, 20 bp, Human papillomavirus type 172
taaatgttacacctgcagat

SEQ ID NO: 45279 - DNA, 20 bp, Human papillomavirus type 172
gaaccaataaatccagtgca

SEQ ID NO: 45280 - DNA, 20 bp, Human papillomavirus type 172
caaattgaggacttaccaac

SEQ ID NO: 45281 - DNA, 20 bp, Human papillomavirus type 172
aaattgaggacttaccaact

SEQ ID NO: 45282 - DNA, 20 bp, Human papillomavirus type 172
aggacttaccaactactagc

SEQ ID NO: 45283 - DNA, 20 bp, Human papillomavirus type 172
ccaactactagcacccctat

SEQ ID NO: 45284 - DNA, 20 bp, Human papillomavirus type 172
taatgattttataatacatc

SEQ ID NO: 45285 - DNA, 20 bp, Human papillomavirus type 172
tataatacatcctagtgtac

SEQ ID NO: 45286 - DNA, 20 bp, Human papillomavirus type 172
ataatacatcctagtgtact

SEQ ID NO: 45287 - DNA, 20 bp, Human papillomavirus type 172
taatacatcctagtgtactg

SEQ ID NO: 45288 - DNA, 20 bp, Human papillomavirus type 172
tttctaatttttttcagatg

SEQ ID NO: 45289 - DNA, 20 bp, Human papillomavirus type 172
caaaggtttctgccaatcag

SEQ ID NO: 45290 - DNA, 20 bp, Human papillomavirus type 172
ctgccaatcagtacagggtt

SEQ ID NO: 45291 - DNA, 20 bp, Human papillomavirus type 172
tgccaatcagtacagggtta

SEQ ID NO: 45292 - DNA, 20 bp, Human papillomavirus type 172
ttagactacaatttccagat

SEQ ID NO: 45293 - DNA, 20 bp, Human papillomavirus type 172
gactacaatttccagatcca

SEQ ID NO: 45294 - DNA, 20 bp, Human papillomavirus type 172
tagacaggatatggcatttg

SEQ ID NO: 45295 - DNA, 20 bp, Human papillomavirus type 172
gaccctaaacaggttcaaat

SEQ ID NO: 45296 - DNA, 20 bp, Human papillomavirus type 172
accctaaacaggttcaaatg

SEQ ID NO: 45297 - DNA, 20 bp, Human papillomavirus type 172
aaatgtgtattgtgggctgc

SEQ ID NO: 45298 - DNA, 20 bp, Human papillomavirus type 172
gaacctgtttagggtcaaat

SEQ ID NO: 45299 - DNA, 20 bp, Human papillomavirus type 172
taatcaagacagagccagtg

SEQ ID NO: 45300 - DNA, 20 bp, Human papillomavirus type 172
aatcaagacagagccagtgt

SEQ ID NO: 45301 - DNA, 20 bp, Human papillomavirus type 172
atcaagacagagccagtgta

SEQ ID NO: 45302 - DNA, 20 bp, Human papillomavirus type 172
agagcttacgaatgaaatca

SEQ ID NO: 45303 - DNA, 20 bp, Human papillomavirus type 172
gagcttacgaatgaaatcag

SEQ ID NO: 45304 - DNA, 20 bp, Human papillomavirus type 172
aatcgcccatattttttaca

SEQ ID NO: 45305 - DNA, 20 bp, Human papillomavirus type 172
tttacatagggcattaggag

SEQ ID NO: 45306 - DNA, 20 bp, Human papillomavirus type 172
ttacatagggcattaggagc

SEQ ID NO: 45307 - DNA, 20 bp, Human papillomavirus type 172
tacatagggcattaggagcc

SEQ ID NO: 45308 - DNA, 20 bp, Human papillomavirus type 172
acatagggcattaggagcca

SEQ ID NO: 45309 - DNA, 20 bp, Human papillomavirus type 172
tctcagacaccattgggtaa

SEQ ID NO: 45310 - DNA, 20 bp, Human papillomavirus type 172
ggtaaacgatttttgtatca

SEQ ID NO: 45311 - DNA, 20 bp, Human papillomavirus type 172
ttgtatcaaagaggacagct

SEQ ID NO: 45312 - DNA, 20 bp, Human papillomavirus type 172
tgtatcaaagaggacagcta

SEQ ID NO: 45313 - DNA, 20 bp, Human papillomavirus type 172
gtatcaaagaggacagctag

SEQ ID NO: 45314 - DNA, 20 bp, Influenza A virus
ctaaaggttccagcgcaaaa

SEQ ID NO: 45315 - DNA, 20 bp, Influenza A virus
cagcgcaaaatgccataagc

SEQ ID NO: 45316 - DNA, 20 bp, Influenza A virus
ccttatactggagatcctcc

SEQ ID NO: 45317 - DNA, 20 bp, Influenza A virus
tactggagatcctccataca

SEQ ID NO: 45318 - DNA, 20 bp, Influenza A virus
ctgttccatggctgtatgga

SEQ ID NO: 45319 - DNA, 20 bp, Influenza A virus
cttgaagaatcccacccagg

SEQ ID NO: 45320 - DNA, 20 bp, Influenza A virus
aagaatcccacccaggtatc

SEQ ID NO: 45321 - DNA, 20 bp, Influenza A virus
gagaactcatgccttgaaac

SEQ ID NO: 45322 - DNA, 20 bp, Influenza A virus
agaactcatgccttgaaaca

SEQ ID NO: 45323 - DNA, 20 bp, Influenza A virus
aaacaatggaagtcgttcaa

SEQ ID NO: 45324 - DNA, 20 bp, Influenza A virus
caaagaaaaaggagagtaag

SEQ ID NO: 45325 - DNA, 20 bp, Influenza A virus
aaagaaaaaggagagtaaga

SEQ ID NO: 45326 - DNA, 20 bp, Influenza A virus
ttcactctttgttttttctt

SEQ ID NO: 45327 - DNA, 20 bp, Influenza A virus
actctttgttttttcttccc

SEQ ID NO: 45328 - DNA, 20 bp, Influenza A virus
gttttttcttccctattgtt

SEQ ID NO: 45329 - DNA, 20 bp, Influenza A virus
gcgaaaagcttgaacagtct

SEQ ID NO: 45330 - DNA, 20 bp, Influenza A virus
cgaaaagcttgaacagtctg

SEQ ID NO: 45331 - DNA, 20 bp, Influenza A virus
aacagtctggacttccggtt

SEQ ID NO: 45332 - DNA, 20 bp, Influenza A virus
cggttgggggtaatgaaaag

SEQ ID NO: 45333 - DNA, 20 bp, Influenza A virus
ggggtaatgaaaagaaggcc

SEQ ID NO: 45334 - DNA, 20 bp, Influenza A virus
tcaaacaaaatggcaagact

SEQ ID NO: 45335 - DNA, 20 bp, Influenza A virus
gagagtaagagaatgaagct

SEQ ID NO: 45336 - DNA, 20 bp, Influenza A virus
ctagcatttctgcgggtatt

SEQ ID NO: 45337 - DNA, 20 bp, Influenza A virus
ctgcgggtatttgtgttcgg

SEQ ID NO: 45338 - DNA, 20 bp, Influenza A virus
tgcgggtatttgtgttcgga

SEQ ID NO: 45339 - DNA, 20 bp, Influenza A virus
ggcaaaagaaatacaccaag

SEQ ID NO: 45340 - DNA, 20 bp, Influenza A virus
tgccctcatagtgaatgcac

SEQ ID NO: 45341 - DNA, 20 bp, Influenza A virus
gccctcatagtgaatgcacc

SEQ ID NO: 45342 - DNA, 20 bp, Influenza A virus
ccctcatagtgaatgcacca

SEQ ID NO: 45343 - DNA, 20 bp, Influenza A virus
tattccctcatgatttggtg

SEQ ID NO: 45344 - DNA, 20 bp, Influenza A virus
gagtaacagtgataaagaac

SEQ ID NO: 45345 - DNA, 20 bp, Influenza A virus
ggccagcaacagcccagatg

SEQ ID NO: 45346 - DNA, 20 bp, Influenza A virus
ttcatcaaagactacagata

SEQ ID NO: 45347 - DNA, 20 bp, Influenza A virus
atcaaagactacagatatac

SEQ ID NO: 45348 - DNA, 20 bp, Influenza A virus
gatgaacaattggagagcca

SEQ ID NO: 45349 - DNA, 20 bp, Influenza A virus
gtatcagatgggggaccaaa

SEQ ID NO: 45350 - DNA, 20 bp, Influenza A virus
tacaatatccggaaccttca

SEQ ID NO: 45351 - DNA, 20 bp, Influenza A virus
acatccctgaagtctgctta

SEQ ID NO: 45352 - DNA, 20 bp, Influenza A virus
aagtgggagctaatggatga

SEQ ID NO: 45353 - DNA, 20 bp, Influenza A virus
cccgataattctcatccatt

SEQ ID NO: 45354 - DNA, 20 bp, Influenza A virus
aggatgaacagatgtaccaa

SEQ ID NO: 45355 - DNA, 20 bp, Influenza A virus
ttcgagaaatttttccctag

SEQ ID NO: 45356 - DNA, 20 bp, Influenza A virus
gagaaatttttccctagtag

SEQ ID NO: 45357 - DNA, 20 bp, Influenza A virus
ttccctagtagttcatatag

SEQ ID NO: 45358 - DNA, 20 bp, Influenza A virus
tccctagtagttcatatagg

SEQ ID NO: 45359 - DNA, 20 bp, Human papillomavirus type 50
gaaggagactgatggagcct

SEQ ID NO: 45360 - DNA, 20 bp, Human papillomavirus type 50
aaggagactgatggagcctc

SEQ ID NO: 45361 - DNA, 20 bp, Human papillomavirus type 50
ggtggactattgcaagcaac

SEQ ID NO: 45362 - DNA, 20 bp, Human papillomavirus type 50
gtggactattgcaagcaaca

SEQ ID NO: 45363 - DNA, 20 bp, Human papillomavirus type 50
caagcaacaacagattagtt

SEQ ID NO: 45364 - DNA, 20 bp, Human papillomavirus type 50
ttttgcctgtgaatttgctt

SEQ ID NO: 45365 - DNA, 20 bp, Human papillomavirus type 50
tgcctgtgaatttgcttagt

SEQ ID NO: 45366 - DNA, 20 bp, Human papillomavirus type 50
gcctgtgaatttgcttagtg

SEQ ID NO: 45367 - DNA, 20 bp, Human papillomavirus type 50
cctgtgaatttgcttagtga

SEQ ID NO: 45368 - DNA, 20 bp, Human papillomavirus type 50
gcttagtgacgaatctattg

SEQ ID NO: 45369 - DNA, 20 bp, Human papillomavirus type 50
gagtccgagactttcagcgg

SEQ ID NO: 45370 - DNA, 20 bp, Human papillomavirus type 50
agtccgagactttcagcggt

SEQ ID NO: 45371 - DNA, 20 bp, Human papillomavirus type 50
cagcggtgcatataacacca

SEQ ID NO: 45372 - DNA, 20 bp, Human papillomavirus type 50
agcggtgcatataacaccag

SEQ ID NO: 45373 - DNA, 20 bp, Human papillomavirus type 50
tggattgtctttctggtgtt

SEQ ID NO: 45374 - DNA, 20 bp, Human papillomavirus type 50
tatttaaaaacaaaactatt

SEQ ID NO: 45375 - DNA, 20 bp, Human papillomavirus type 50
aaaaacaaaactattcattc

SEQ ID NO: 45376 - DNA, 20 bp, Human papillomavirus type 50
aaaacaaaactattcattcc

SEQ ID NO: 45377 - DNA, 20 bp, Human papillomavirus type 50
attcctctgtcactagctcc

SEQ ID NO: 45378 - DNA, 20 bp, Human papillomavirus type 50
ctctgtcactagctcctcaa

SEQ ID NO: 45379 - DNA, 20 bp, Human papillomavirus type 50
ggcccaaaatcagagggata

SEQ ID NO: 45380 - DNA, 20 bp, Human papillomavirus type 50
cttattgcttttaaaaatcc

SEQ ID NO: 45381 - DNA, 20 bp, Human papillomavirus type 50
ttgcttttaaaaatcctgaa

SEQ ID NO: 45382 - DNA, 20 bp, Human papillomavirus type 50
cttttaaaaatcctgaacaa

SEQ ID NO: 45383 - DNA, 20 bp, Human papillomavirus type 50
taaaaatcctgaacaaaggc

SEQ ID NO: 45384 - DNA, 20 bp, Human papillomavirus type 50
gttattgaaaatatttggag

SEQ ID NO: 45385 - DNA, 20 bp, Human papillomavirus type 50
ttgaaaatatttggaggttt

SEQ ID NO: 45386 - DNA, 20 bp, Human papillomavirus type 50
aaaatatttggaggtttagt

SEQ ID NO: 45387 - DNA, 20 bp, Human papillomavirus type 50
ggaggtttagtatactttgg

SEQ ID NO: 45388 - DNA, 20 bp, Human papillomavirus type 50
gaggtttagtatactttggc

SEQ ID NO: 45389 - DNA, 20 bp, Human papillomavirus type 50
gatttgcagctccagatgct

SEQ ID NO: 45390 - DNA, 20 bp, Human papillomavirus type 50
gcagctccagatgctggacc

SEQ ID NO: 45391 - DNA, 20 bp, Human papillomavirus type 50
cagctccagatgctggacct

SEQ ID NO: 45392 - DNA, 20 bp, Human papillomavirus type 50
aattatatactataacaaat

SEQ ID NO: 45393 - DNA, 20 bp, Human papillomavirus type 50
tatactataacaaattccac

SEQ ID NO: 45394 - DNA, 20 bp, Human papillomavirus type 50
gcaggagacactgtaggtga

SEQ ID NO: 45395 - DNA, 20 bp, Human papillomavirus type 50
caggagacactgtaggtgac

SEQ ID NO: 45396 - DNA, 20 bp, Human papillomavirus type 50
tatgaagagatacctttgga

SEQ ID NO: 45397 - DNA, 20 bp, Human papillomavirus type 50
atgaagagatacctttggaa

SEQ ID NO: 45398 - DNA, 20 bp, Human papillomavirus type 50
tgaagagatacctttggaac

SEQ ID NO: 45399 - DNA, 20 bp, Human papillomavirus type 50
gacccagatgtgagcctata

SEQ ID NO: 45400 - DNA, 20 bp, Human papillomavirus type 50
acccagatgtgagcctatac

SEQ ID NO: 45401 - DNA, 20 bp, Human papillomavirus type 50
gagcgggatttggaaggcct

SEQ ID NO: 45402 - DNA, 20 bp, Human papillomavirus type 50
agcgggatttggaaggcctc

SEQ ID NO: 45403 - DNA, 20 bp, Human papillomavirus type 50
ggaaggcctcagggcagcgc

SEQ ID NO: 45404 - DNA, 20 bp, Human papillomavirus type 50
taagcaccgatgaatatgtg

SEQ ID NO: 45405 - DNA, 20 bp, Human papillomavirus type 50
aagcaccgatgaatatgtga

SEQ ID NO: 45406 - DNA, 20 bp, Human papillomavirus type 50
agcaccgatgaatatgtgaa

SEQ ID NO: 45407 - DNA, 20 bp, Human papillomavirus type 50
actttcatgcacgcagtgag

SEQ ID NO: 45408 - DNA, 20 bp, Human papillomavirus type 50
ctttcatgcacgcagtgagc

SEQ ID NO: 45409 - DNA, 20 bp, Human papillomavirus type 50
aggtgttggatctactggtc

SEQ ID NO: 45410 - DNA, 20 bp, Human papillomavirus type 50
ggtgttggatctactggtca

SEQ ID NO: 45411 - DNA, 20 bp, Human papillomavirus type 50
gatctactggtcatcccttg

SEQ ID NO: 45412 - DNA, 20 bp, Human papillomavirus type 50
tttaataaggttggagacac

SEQ ID NO: 45413 - DNA, 20 bp, Human papillomavirus type 50
aataaggttggagacacaga

SEQ ID NO: 45414 - DNA, 20 bp, Human papillomavirus type 50
tattcaggatggtgatatgg

SEQ ID NO: 45415 - DNA, 20 bp, Human papillomavirus type 50
aggatggtgatatgggagat

SEQ ID NO: 45416 - DNA, 20 bp, Human papillomavirus type 50
ggtaatgcaaactttcctaa

SEQ ID NO: 45417 - DNA, 20 bp, Human papillomavirus type 50
gtaatgcaaactttcctaaa

SEQ ID NO: 45418 - DNA, 20 bp, Human papillomavirus type 50
cctaaactacaacaggacag

SEQ ID NO: 45419 - DNA, 20 bp, Human papillomavirus type 109
tattgcctgttaatctgctt

SEQ ID NO: 45420 - DNA, 20 bp, Human papillomavirus type 109
cctgttaatctgctttgtaa

SEQ ID NO: 45421 - DNA, 20 bp, Human papillomavirus type 109
atctgctttgtaacgaggat

SEQ ID NO: 45422 - DNA, 20 bp, Human papillomavirus type 109
gtaacgaggatttgtcacaa

SEQ ID NO: 45423 - DNA, 20 bp, Human papillomavirus type 109
taacgaggatttgtcacaag

SEQ ID NO: 45424 - DNA, 20 bp, Human papillomavirus type 109
cagtgtgtaagcctttcagc

SEQ ID NO: 45425 - DNA, 20 bp, Human papillomavirus type 109
cagcttcttcaaagaacatt

SEQ ID NO: 45426 - DNA, 20 bp, Human papillomavirus type 109
agcttcttcaaagaacatta

SEQ ID NO: 45427 - DNA, 20 bp, Human papillomavirus type 109
ttcaaagaacattaaaagac

SEQ ID NO: 45428 - DNA, 20 bp, Human papillomavirus type 109
aaagaacattaaaagacgtc

SEQ ID NO: 45429 - DNA, 20 bp, Human papillomavirus type 109
gacgacgacgacgagaaaga

SEQ ID NO: 45430 - DNA, 20 bp, Human papillomavirus type 109
tctttctcgtcgtcgtcgtc

SEQ ID NO: 45431 - DNA, 20 bp, Human papillomavirus type 109
ctcgtcgtcgtcgtcgaagt

SEQ ID NO: 45432 - DNA, 20 bp, Human papillomavirus type 109
tcgtcgtcgtcgtcgaagtc

SEQ ID NO: 45433 - DNA, 20 bp, Human papillomavirus type 109
taggcgtcgacgcactggtg

SEQ ID NO: 45434 - DNA, 20 bp, Human papillomavirus type 109
tttgcttaaaaggtcctgct

SEQ ID NO: 45435 - DNA, 20 bp, Human papillomavirus type 109
gcttaaaaggtcctgctaat

SEQ ID NO: 45436 - DNA, 20 bp, Human papillomavirus type 109
cttaaaaggtcctgctaata

SEQ ID NO: 45437 - DNA, 20 bp, Human papillomavirus type 109
aaaggtcctgctaatacatt

SEQ ID NO: 45438 - DNA, 20 bp, Human papillomavirus type 109
aaatgctggagatatcgctg

SEQ ID NO: 45439 - DNA, 20 bp, Human papillomavirus type 109
tgattagaccaaacatagtg

SEQ ID NO: 45440 - DNA, 20 bp, Human papillomavirus type 109
gaccaaacatagtggttgaa

SEQ ID NO: 45441 - DNA, 20 bp, Human papillomavirus type 109
aacctgtaggaccttcagaa

SEQ ID NO: 45442 - DNA, 20 bp, Human papillomavirus type 109
agaattggtgccaatagacg

SEQ ID NO: 45443 - DNA, 20 bp, Human papillomavirus type 109
gtgccaatagacgccctaaa

SEQ ID NO: 45444 - DNA, 20 bp, Human papillomavirus type 109
gaaaacctagatgtgctagt

SEQ ID NO: 45445 - DNA, 20 bp, Human papillomavirus type 109
cacttctattattgcagctg

SEQ ID NO: 45446 - DNA, 20 bp, Human papillomavirus type 109
tattattgcagctgtatcgt

SEQ ID NO: 45447 - DNA, 20 bp, Human papillomavirus type 109
ttgcagctgtatcgtctgca

SEQ ID NO: 45448 - DNA, 20 bp, Human papillomavirus type 109
cagctgtatcgtctgcagtt

SEQ ID NO: 45449 - DNA, 20 bp, Human papillomavirus type 109
tagtagagctttttttagag

SEQ ID NO: 45450 - DNA, 20 bp, Human papillomavirus type 109
agtagagctttttttagagc

SEQ ID NO: 45451 - DNA, 20 bp, Human papillomavirus type 109
gtagagctttttttagagca

SEQ ID NO: 45452 - DNA, 20 bp, Human papillomavirus type 109
ttttagagcaagggagttgt

SEQ ID NO: 45453 - DNA, 20 bp, Human papillomavirus type 109
tttagagcaagggagttgta

SEQ ID NO: 45454 - DNA, 20 bp, Human papillomavirus type 109
attatttcctgaagaggagt

SEQ ID NO: 45455 - DNA, 20 bp, Human papillomavirus type 109
ttatttcctgaagaggagtt

SEQ ID NO: 45456 - DNA, 20 bp, Human papillomavirus type 109
tttcctgaagaggagttagt

SEQ ID NO: 45457 - DNA, 20 bp, Human papillomavirus type 109
cctgaagaggagttagtaga

SEQ ID NO: 45458 - DNA, 20 bp, Human papillomavirus type 109
ctgaagaggagttagtagat

SEQ ID NO: 45459 - DNA, 20 bp, Human papillomavirus type 109
ttaatattttacagatgtca

SEQ ID NO: 45460 - DNA, 20 bp, Human papillomavirus type 109
taatattttacagatgtcat

SEQ ID NO: 45461 - DNA, 20 bp, Human papillomavirus type 109
aatattttacagatgtcata

SEQ ID NO: 45462 - DNA, 20 bp, Human papillomavirus type 109
atattttacagatgtcatat

SEQ ID NO: 45463 - DNA, 20 bp, Human papillomavirus type 109
tacagatgtcatattggctg

SEQ ID NO: 45464 - DNA, 20 bp, Human papillomavirus type 109
gtttagctgcaagaacaaat

SEQ ID NO: 45465 - DNA, 20 bp, Human papillomavirus type 109
agctgcaagaacaaattctt

SEQ ID NO: 45466 - DNA, 20 bp, Human papillomavirus type 109
gctgcaagaacaaattcttt

SEQ ID NO: 45467 - DNA, 20 bp, Human papillomavirus type 109
tttgacaggtaaacgtaaac

SEQ ID NO: 45468 - DNA, 20 bp, Human papillomavirus type 109
gacaggtaaacgtaaacgtg

SEQ ID NO: 45469 - DNA, 20 bp, Human papillomavirus type 109
ggccaattgccatgcaggtg

SEQ ID NO: 45470 - DNA, 20 bp, Human papillomavirus type 109
gccaattgccatgcaggtgg

SEQ ID NO: 45471 - DNA, 20 bp, Human papillomavirus type 109
ccatgcaggtggtaccccac

SEQ ID NO: 45472 - DNA, 20 bp, Human papillomavirus type 109
ataggtatatcctggactca

SEQ ID NO: 45473 - DNA, 20 bp, Human papillomavirus type 109
taaacacaaagtgttttgga

SEQ ID NO: 45474 - DNA, 20 bp, Human papillomavirus type 121
taacacctttggcttttctt

SEQ ID NO: 45475 - DNA, 20 bp, Human papillomavirus type 121
ggcttttctttaaaggacat

SEQ ID NO: 45476 - DNA, 20 bp, Human papillomavirus type 121
gcttttctttaaaggacatt

SEQ ID NO: 45477 - DNA, 20 bp, Human papillomavirus type 121
tctttaaaggacattagact

SEQ ID NO: 45478 - DNA, 20 bp, Human papillomavirus type 121
ctttaaaggacattagacta

SEQ ID NO: 45479 - DNA, 20 bp, Human papillomavirus type 121
gatgagcaaccttatagaat

SEQ ID NO: 45480 - DNA, 20 bp, Human papillomavirus type 121
tagaatagattcagtgtgca

SEQ ID NO: 45481 - DNA, 20 bp, Human papillomavirus type 121
agtgtgcagagtttgtaaaa

SEQ ID NO: 45482 - DNA, 20 bp, Human papillomavirus type 121
gtaaaacgtcaatcagattt

SEQ ID NO: 45483 - DNA, 20 bp, Human papillomavirus type 121
taaaacgtcaatcagatttt

SEQ ID NO: 45484 - DNA, 20 bp, Human papillomavirus type 121
gtcttcacaaaaaaacagta

SEQ ID NO: 45485 - DNA, 20 bp, Human papillomavirus type 121
tcttcacaaaaaaacagtaa

SEQ ID NO: 45486 - DNA, 20 bp, Human papillomavirus type 121
acaaaaaaacagtaaaagac

SEQ ID NO: 45487 - DNA, 20 bp, Human papillomavirus type 121
tttgagaacagtggcagtgc

SEQ ID NO: 45488 - DNA, 20 bp, Human papillomavirus type 121
gagaacagtggcagtgcaga

SEQ ID NO: 45489 - DNA, 20 bp, Human papillomavirus type 121
atatttctataagtgtacaa

SEQ ID NO: 45490 - DNA, 20 bp, Human papillomavirus type 121
tatttctataagtgtacaac

SEQ ID NO: 45491 - DNA, 20 bp, Human papillomavirus type 121
ctataagtgtacaactggaa

SEQ ID NO: 45492 - DNA, 20 bp, Human papillomavirus type 121
tataagtgtacaactggaaa

SEQ ID NO: 45493 - DNA, 20 bp, Human papillomavirus type 121
atggtagaacatcaatcagc

SEQ ID NO: 45494 - DNA, 20 bp, Human papillomavirus type 121
catgaatagtcacagtcatt

SEQ ID NO: 45495 - DNA, 20 bp, Human papillomavirus type 121
ttggattcaaccattgatag

SEQ ID NO: 45496 - DNA, 20 bp, Human papillomavirus type 121
tggattcaaccattgataga

SEQ ID NO: 45497 - DNA, 20 bp, Human papillomavirus type 121
ggattcaaccattgatagat

SEQ ID NO: 45498 - DNA, 20 bp, Human papillomavirus type 121
gattcaaccattgatagatt

SEQ ID NO: 45499 - DNA, 20 bp, Human papillomavirus type 121
gatgctgtgcaagaagctct

SEQ ID NO: 45500 - DNA, 20 bp, Human papillomavirus type 121
actctatatgaaaatgctgc

SEQ ID NO: 45501 - DNA, 20 bp, Human papillomavirus type 121
atacacaaatacagcactgg

SEQ ID NO: 45502 - DNA, 20 bp, Human papillomavirus type 121
ataattcccagtgctgtatt

SEQ ID NO: 45503 - DNA, 20 bp, Human papillomavirus type 121
ccagtgctgtatttgtgtat

SEQ ID NO: 45504 - DNA, 20 bp, Human papillomavirus type 121
tcagttactggagaatggga

SEQ ID NO: 45505 - DNA, 20 bp, Human papillomavirus type 121
ctggagaatgggaggtgaaa

SEQ ID NO: 45506 - DNA, 20 bp, Human papillomavirus type 121
ctccctctgttacctctagc

SEQ ID NO: 45507 - DNA, 20 bp, Human papillomavirus type 121
tccctctgttacctctagct

SEQ ID NO: 45508 - DNA, 20 bp, Human papillomavirus type 121
cctctagctcctctcccact

SEQ ID NO: 45509 - DNA, 20 bp, Human papillomavirus type 121
ttatcctttaaagacactgc

SEQ ID NO: 45510 - DNA, 20 bp, Human papillomavirus type 121
tcctttaaagacactgcaca

SEQ ID NO: 45511 - DNA, 20 bp, Human papillomavirus type 121
aaagacactgcacaaagaca

SEQ ID NO: 45512 - DNA, 20 bp, Human papillomavirus type 121
aagacactgcacaaagacaa

SEQ ID NO: 45513 - DNA, 20 bp, Human papillomavirus type 121
tttttggacactgtcacact

SEQ ID NO: 45514 - DNA, 20 bp, Human papillomavirus type 121
ttcctatagatactgttgat

SEQ ID NO: 45515 - DNA, 20 bp, Human papillomavirus type 121
ctatagatactgttgatcca

SEQ ID NO: 45516 - DNA, 20 bp, Human papillomavirus type 121
atccagcagggcctgctttg

SEQ ID NO: 45517 - DNA, 20 bp, Human papillomavirus type 121
ggtgcctctaaatgaaggca

SEQ ID NO: 45518 - DNA, 20 bp, Human papillomavirus type 121
gtgcctctaaatgaaggcaa

SEQ ID NO: 45519 - DNA, 20 bp, Human papillomavirus type 121
taaagctcgtgacctctata

SEQ ID NO: 45520 - DNA, 20 bp, Human papillomavirus type 121
ttaaatcagccttcccgcct

SEQ ID NO: 45521 - DNA, 20 bp, Human papillomavirus type 121
taaatcagccttcccgccta

SEQ ID NO: 45522 - DNA, 20 bp, Human papillomavirus type 121
aaatcagccttcccgcctag

SEQ ID NO: 45523 - DNA, 20 bp, Human papillomavirus type 121
aatcagccttcccgcctagt

SEQ ID NO: 45524 - DNA, 20 bp, Human papillomavirus type 121
gaaggtgtttgtaacagata

SEQ ID NO: 45525 - DNA, 20 bp, Human papillomavirus type 121
aaggtgtttgtaacagatat

SEQ ID NO: 45526 - DNA, 20 bp, Human papillomavirus type 121
gtaacagatatagcacaacc

SEQ ID NO: 45527 - DNA, 20 bp, Human papillomavirus type 121
taacagatatagcacaacca

SEQ ID NO: 45528 - DNA, 20 bp, Human papillomavirus type 121
gtgtcatacccacaaacaaa

SEQ ID NO: 45529 - DNA, 20 bp, Human papillomavirus type 121
agggttatgctgccagatcc

SEQ ID NO: 45530 - DNA, 20 bp, Human papillomavirus type 121
tgctgccagatccaaacaaa

SEQ ID NO: 45531 - DNA, 20 bp, Human papillomavirus type 121
gcattagttgatacagatgt

SEQ ID NO: 45532 - DNA, 20 bp, Human papillomavirus type 121
cattagttgatacagatgtt

SEQ ID NO: 45533 - DNA, 20 bp, Human papillomavirus type 121
gttgatacagatgtttataa

SEQ ID NO: 45534 - DNA, 20 bp, Human papillomavirus type 121
tacctgtaagtggcccgatt

SEQ ID NO: 45535 - DNA, 20 bp, Human papillomavirus type 121
tgttaaaatgacaaaggaat

SEQ ID NO: 45536 - DNA, 20 bp, Human papillomavirus type 121
gttaaaatgacaaaggaatc

SEQ ID NO: 45537 - DNA, 20 bp, Human papillomavirus type 121
ttaaaatgacaaaggaatcc

SEQ ID NO: 45538 - DNA, 20 bp, Human papillomavirus type 121
aaatgacaaaggaatcctat

SEQ ID NO: 45539 - DNA, 20 bp, Human papillomavirus type 121
tgtctcatattaatgctatg

SEQ ID NO: 45540 - DNA, 20 bp, Human papillomavirus type 121
gtctcatattaatgctatga

SEQ ID NO: 45541 - DNA, 20 bp, Human papillomavirus type 121
tctcatattaatgctatgaa

SEQ ID NO: 45542 - DNA, 20 bp, Human papillomavirus type 121
atgctatgaatccttctata

SEQ ID NO: 45543 - DNA, 20 bp, Human papillomavirus type 121
tatattagaagactggaatt

SEQ ID NO: 45544 - DNA, 20 bp, Human papillomavirus type 121
aataaaattgcaatgcttgc

SEQ ID NO: 45545 - DNA, 20 bp, Human papillomavirus type 121
ataaaattgcaatgcttgca

SEQ ID NO: 45546 - DNA, 20 bp, Human papillomavirus type 121
caatgcttgcaccttaatgt

SEQ ID NO: 45547 - DNA, 20 bp, Human papillomavirus type 121
caccttaatgtttcattgct

SEQ ID NO: 45548 - DNA, 20 bp, Human papillomavirus type 121
atgtttcattgcttttgttt

SEQ ID NO: 45549 - DNA, 20 bp, Human papillomavirus type 121
cgttactggctgtgtgcctt

SEQ ID NO: 45550 - DNA, 20 bp, Human papillomavirus type 121
gttactggctgtgtgccttt

SEQ ID NO: 45551 - DNA, 20 bp, Human papillomavirus type 121
ctggctgtgtgcctttgtac

SEQ ID NO: 45552 - DNA, 20 bp, Human papillomavirus type 121
gtaccgggagtggtaactgc

SEQ ID NO: 45553 - DNA, 20 bp, Human papillomavirus type 121
taccgggagtggtaactgct

SEQ ID NO: 45554 - DNA, 20 bp, Human herpesvirus 1
cgtgaacaagactatcacgg

SEQ ID NO: 45555 - DNA, 20 bp, Human herpesvirus 1
cccgtctccatgtccaggat

SEQ ID NO: 45556 - DNA, 20 bp, Human herpesvirus 1
ttcacgtaaggcgacagggc

SEQ ID NO: 45557 - DNA, 20 bp, Human herpesvirus 1
acgtaaggcgacagggcgac

SEQ ID NO: 45558 - DNA, 20 bp, Human herpesvirus 1
cgtcctcaagttttcgcacc

SEQ ID NO: 45559 - DNA, 20 bp, Human herpesvirus 1
tcgcacccgtcgcccctctc

SEQ ID NO: 45560 - DNA, 20 bp, Human herpesvirus 1
cgcacccgtcgcccctctcc

SEQ ID NO: 45561 - DNA, 20 bp, Human herpesvirus 1
gcacccgtcgcccctctcca

SEQ ID NO: 45562 - DNA, 20 bp, Human herpesvirus 1
cgaacggaaccttggagagg

SEQ ID NO: 45563 - DNA, 20 bp, Human herpesvirus 1
gacacgccaaaccacgagtc

SEQ ID NO: 45564 - DNA, 20 bp, Human herpesvirus 1
cattcggggtgccgctgtgg

SEQ ID NO: 45565 - DNA, 20 bp, Human herpesvirus 1
ggggtgccgctgtggcctca

SEQ ID NO: 45566 - DNA, 20 bp, Human herpesvirus 1
cgggcccccgtgtaaaggtt

SEQ ID NO: 45567 - DNA, 20 bp, Human herpesvirus 1
gtcaggtgaggccacagcgg

SEQ ID NO: 45568 - DNA, 20 bp, Human herpesvirus 1
aggcgcaggttgccgggcgt

SEQ ID NO: 45569 - DNA, 20 bp, Human herpesvirus 1
ccgggcgtaaagcagatggc

SEQ ID NO: 45570 - DNA, 20 bp, Human herpesvirus 1
tccaggctaaggccctggga

SEQ ID NO: 45571 - DNA, 20 bp, Human herpesvirus 1
ccatgaccatcacgcgctcc

SEQ ID NO: 45572 - DNA, 20 bp, Human herpesvirus 1
gcctggacaaggtcgccatc

SEQ ID NO: 45573 - DNA, 20 bp, Human herpesvirus 1
gtcccgcaagaccacgtaag

SEQ ID NO: 45574 - DNA, 20 bp, Human herpesvirus 1
cagtaactcggccacgttgg

SEQ ID NO: 45575 - DNA, 20 bp, Human herpesvirus 1
gccgtcgcgtgccgcctccg

SEQ ID NO: 45576 - DNA, 20 bp, Human herpesvirus 1
ctggaagaggcccccctgcc

SEQ ID NO: 45577 - DNA, 20 bp, Human herpesvirus 1
cgtggtcttgcgggaccaac

SEQ ID NO: 45578 - DNA, 20 bp, Human herpesvirus 1
gctgtgcacctcgcagcgca

SEQ ID NO: 45579 - DNA, 20 bp, Human herpesvirus 1
ctgtgcacctcgcagcgcat

SEQ ID NO: 45580 - DNA, 20 bp, Human herpesvirus 1
gtgatgcggctggcgttggc

SEQ ID NO: 45581 - DNA, 20 bp, Human herpesvirus 1
gccgtgagccacttttcaat

SEQ ID NO: 45582 - DNA, 20 bp, Human herpesvirus 1
aaaagtggctcacggccaac

SEQ ID NO: 45583 - DNA, 20 bp, Human herpesvirus 1
aggtaggcgtggagcttggc

SEQ ID NO: 45584 - DNA, 20 bp, Human herpesvirus 1
gccatgtacgcgctcacctc

SEQ ID NO: 45585 - DNA, 20 bp, Human herpesvirus 1
gtgggaggagaacagccgcg

SEQ ID NO: 45586 - DNA, 20 bp, Human herpesvirus 1
tgggaggagaacagccgcgt

SEQ ID NO: 45587 - DNA, 20 bp, Human herpesvirus 1
tcctcccacaaagaggtgag

SEQ ID NO: 45588 - DNA, 20 bp, Human herpesvirus 1
ctggtgctcgaaggtcgact

SEQ ID NO: 45589 - DNA, 20 bp, Human herpesvirus 1
tggtgctcgaaggtcgactc

SEQ ID NO: 45590 - DNA, 20 bp, Human herpesvirus 1
gtgtgtgtgggctcgccgac

SEQ ID NO: 45591 - DNA, 20 bp, Human herpesvirus 1
gagcaccagaaactgcggtg

SEQ ID NO: 45592 - DNA, 20 bp, Human herpesvirus 1
gagcttgcctgtctgctgat

SEQ ID NO: 45593 - DNA, 20 bp, Human herpesvirus 1
agcttgcctgtctgctgatg

SEQ ID NO: 45594 - DNA, 20 bp, Human herpesvirus 1
cctgtctgctgatgtacctg

SEQ ID NO: 45595 - DNA, 20 bp, Human herpesvirus 1
gcaaaggtcgacggggtggc

SEQ ID NO: 45596 - DNA, 20 bp, Human herpesvirus 1
gggggcagttctccaggtac

SEQ ID NO: 45597 - DNA, 20 bp, Human herpesvirus 1
atggtgcacgtaaaaccgtt

SEQ ID NO: 45598 - DNA, 20 bp, Human herpesvirus 1
gacgacgagttcgtcctgcc

SEQ ID NO: 45599 - DNA, 20 bp, Human herpesvirus 1
gtcctgccccactggtacat

SEQ ID NO: 45600 - DNA, 20 bp, Human herpesvirus 1
ttggccagcaggtaccgggc

SEQ ID NO: 45601 - DNA, 20 bp, Human herpesvirus 1
gccagcaggtaccgggccat

SEQ ID NO: 45602 - DNA, 20 bp, Human herpesvirus 1
gccccagattatcttgaaca

SEQ ID NO: 45603 - DNA, 20 bp, Human herpesvirus 1
tcttgaacagcgccaccgcg

SEQ ID NO: 45604 - DNA, 20 bp, Human herpesvirus 1
aacagcgccaccgcgtggtc

SEQ ID NO: 45605 - DNA, 20 bp, Human herpesvirus 1
gcgagacggaccacgcggtg

SEQ ID NO: 45606 - DNA, 20 bp, Human herpesvirus 1
aagataatctggggcgaact

SEQ ID NO: 45607 - DNA, 20 bp, Human herpesvirus 1
ggactcggcggccgggggat

SEQ ID NO: 45608 - DNA, 20 bp, Human herpesvirus 1
ggccccgatgacgtgctgga

SEQ ID NO: 45609 - DNA, 20 bp, Human herpesvirus 1
tttcgtcgacggtctccttc

SEQ ID NO: 45610 - DNA, 20 bp, Human herpesvirus 1
ttcgtcgacggtctccttcg

SEQ ID NO: 45611 - DNA, 20 bp, Human herpesvirus 1
tcgtcgacggtctccttcgc

SEQ ID NO: 45612 - DNA, 20 bp, Human herpesvirus 1
cgtcgacggtctccttcgcg

SEQ ID NO: 45613 - DNA, 20 bp, Human herpesvirus 1
gtcgacggtctccttcgcgg

SEQ ID NO: 45614 - DNA, 20 bp, Human herpesvirus 1
ccgcagccagcggatcagcg

SEQ ID NO: 45615 - DNA, 20 bp, Human herpesvirus 1
ttcccgaccccattggcgcg

SEQ ID NO: 45616 - DNA, 20 bp, Human herpesvirus 1
tcccgaccccattggcgcgc

SEQ ID NO: 45617 - DNA, 20 bp, Human herpesvirus 1
cccgaccccattggcgcgcg

SEQ ID NO: 45618 - DNA, 20 bp, Human herpesvirus 1
ccgaccccattggcgcgcgg

SEQ ID NO: 45619 - DNA, 20 bp, Human herpesvirus 1
ctggcccatcgcatcagcca

SEQ ID NO: 45620 - DNA, 20 bp, Human herpesvirus 1
acgtcctgcactttgcgtgt

SEQ ID NO: 45621 - DNA, 20 bp, Human herpesvirus 1
cgtcctgcactttgcgtgtc

SEQ ID NO: 45622 - DNA, 20 bp, Human herpesvirus 1
gcgtgtctggtgtattttgc

SEQ ID NO: 45623 - DNA, 20 bp, Human herpesvirus 1
cgtgtctggtgtattttgcg

SEQ ID NO: 45624 - DNA, 20 bp, Human herpesvirus 1
gctggatggccttatagatc

SEQ ID NO: 45625 - DNA, 20 bp, Human herpesvirus 1
gacgacacgctcgccgagct

SEQ ID NO: 45626 - DNA, 20 bp, Human herpesvirus 1
tccggggcccggccctgctg

SEQ ID NO: 45627 - DNA, 20 bp, Human herpesvirus 1
cgccctcctccgcgctggtg

SEQ ID NO: 45628 - DNA, 20 bp, Human herpesvirus 1
atcggcaggcaccgcaccag

SEQ ID NO: 45629 - DNA, 20 bp, Human herpesvirus 1
tcggcaggcaccgcaccagc

SEQ ID NO: 45630 - DNA, 20 bp, Human herpesvirus 1
cgcctggaggacggcgccgg

SEQ ID NO: 45631 - DNA, 20 bp, Human herpesvirus 1
acgggcgaatgggagctcgg

SEQ ID NO: 45632 - DNA, 20 bp, Human herpesvirus 1
gcccgttaaccccccacgtg

SEQ ID NO: 45633 - DNA, 20 bp, Human herpesvirus 1
accccccacgtgatcagcac

SEQ ID NO: 45634 - DNA, 20 bp, Human herpesvirus 1
agctcgggaggcagcgccac

SEQ ID NO: 45635 - DNA, 20 bp, Human herpesvirus 1
tgtgtgtgctggtaatttat

SEQ ID NO: 45636 - DNA, 20 bp, Human herpesvirus 1
atacaccgatccgtaaacgc

SEQ ID NO: 45637 - DNA, 20 bp, Human herpesvirus 1
tacaccgatccgtaaacgcg

SEQ ID NO: 45638 - DNA, 20 bp, Human herpesvirus 1
acggatcggtgtataaatta

SEQ ID NO: 45639 - DNA, 20 bp, Human herpesvirus 1
gggccccggggatctcgagg

SEQ ID NO: 45640 - DNA, 20 bp, Human herpesvirus 1
atggcgaacacggggctgca

SEQ ID NO: 45641 - DNA, 20 bp, Human herpesvirus 1
cggatgcgcgtgagggtgag

SEQ ID NO: 45642 - DNA, 20 bp, Human herpesvirus 1
gccatcaaccccgccctaca

SEQ ID NO: 45643 - DNA, 20 bp, Human herpesvirus 1
ctcctcctggtccgcaagac

SEQ ID NO: 45644 - DNA, 20 bp, Human herpesvirus 1
ctaaccgcacaccgacggta

SEQ ID NO: 45645 - DNA, 20 bp, Human herpesvirus 1
taaccgcacaccgacggtac

SEQ ID NO: 45646 - DNA, 20 bp, Human herpesvirus 1
gtgagcgcctggacgccgtg

SEQ ID NO: 45647 - DNA, 20 bp, Human herpesvirus 1
cggaccaggaggagcaactc

SEQ ID NO: 45648 - DNA, 20 bp, Human herpesvirus 1
caagtgggccgcctttgcag

SEQ ID NO: 45649 - DNA, 20 bp, Human herpesvirus 1
gcagccataaaggcgccaac

SEQ ID NO: 45650 - DNA, 20 bp, Human herpesvirus 1
cagccataaaggcgccaaca

SEQ ID NO: 45651 - DNA, 20 bp, Human herpesvirus 1
ggtgctgacgccctcccggt

SEQ ID NO: 45652 - DNA, 20 bp, Human herpesvirus 1
gttggcgcctttatggctgc

SEQ ID NO: 45653 - DNA, 20 bp, Human herpesvirus 1
gcacgcatacgggcggccac

SEQ ID NO: 45654 - DNA, 20 bp, Human herpesvirus 1
ggaagggccacctgacacag

SEQ ID NO: 45655 - DNA, 20 bp, Human herpesvirus 1
ggtgtctaacggtcctcacc

SEQ ID NO: 45656 - DNA, 20 bp, Human herpesvirus 1
ctaacccagaccccgggcgc

SEQ ID NO: 45657 - DNA, 20 bp, Human herpesvirus 1
gccaagtgcgcgttcatggt

SEQ ID NO: 45658 - DNA, 20 bp, Human herpesvirus 1
atggttcgggggtgggtgtg

SEQ ID NO: 45659 - DNA, 20 bp, Human herpesvirus 1
gggggtgggtgtgggtgtgt

SEQ ID NO: 45660 - DNA, 20 bp, Human herpesvirus 1
ccgcggactcgggggacccg

SEQ ID NO: 45661 - DNA, 20 bp, Human herpesvirus 1
gccaacgaggtccagtacga

SEQ ID NO: 45662 - DNA, 20 bp, Human herpesvirus 1
tgaccaagtctgcgggggag

SEQ ID NO: 45663 - DNA, 20 bp, Human herpesvirus 1
ctgttgtaccgcccctcgac

SEQ ID NO: 45664 - DNA, 20 bp, Human herpesvirus 1
tgttgtaccgcccctcgacc

SEQ ID NO: 45665 - DNA, 20 bp, Human herpesvirus 1
taccgcccctcgaccaccac

SEQ ID NO: 45666 - DNA, 20 bp, Human herpesvirus 1
gtcagaacgggccggtcgtc

SEQ ID NO: 45667 - DNA, 20 bp, Human herpesvirus 1
cggaaaacggaacggcgcct

SEQ ID NO: 45668 - DNA, 20 bp, Human herpesvirus 1
tggtcgccgtcattatggcc

SEQ ID NO: 45669 - DNA, 20 bp, Human herpesvirus 1
tggccatctacctcgcggcc

SEQ ID NO: 45670 - DNA, 20 bp, Human herpesvirus 1
cgttttccggaatacgtacg

SEQ ID NO: 45671 - DNA, 20 bp, Human herpesvirus 1
tccggaatacgtacggacgt

SEQ ID NO: 45672 - DNA, 20 bp, Human herpesvirus 1
gctctccatcctgcatcagg

SEQ ID NO: 45673 - DNA, 20 bp, Human herpesvirus 1
ggggtgaatgagctgggcgg

SEQ ID NO: 45674 - DNA, 20 bp, Human herpesvirus 1
accccgaagccccggccctg

SEQ ID NO: 45675 - DNA, 20 bp, Human herpesvirus 1
acgaggcgctcgtcgcctgg

SEQ ID NO: 45676 - DNA, 20 bp, Human herpesvirus 1
cgaggcgctcgtcgcctggc

SEQ ID NO: 45677 - DNA, 20 bp, Human herpesvirus 1
aggtcccggatgcccctggc

SEQ ID NO: 45678 - DNA, 20 bp, Human herpesvirus 1
cgcgcgccaggggcgatgga

SEQ ID NO: 45679 - DNA, 20 bp, Human herpesvirus 1
gcgcgccaggggcgatggaa

SEQ ID NO: 45680 - DNA, 20 bp, Human herpesvirus 1
cggtttcccgttccgcttcc

SEQ ID NO: 45681 - DNA, 20 bp, Human herpesvirus 1
cccgttccgcttccatcgcc

SEQ ID NO: 45682 - DNA, 20 bp, Human herpesvirus 1
ggcggcgatgtcggccgacg

SEQ ID NO: 45683 - DNA, 20 bp, Human herpesvirus 1
gcggcgatgtcggccgacgt

SEQ ID NO: 45684 - DNA, 20 bp, Human herpesvirus 1
aagttctttacgtcggccga

SEQ ID NO: 45685 - DNA, 20 bp, Human herpesvirus 1
agttctttacgtcggccgac

SEQ ID NO: 45686 - DNA, 20 bp, Human herpesvirus 1
tttacgtcggccgacatcgc

SEQ ID NO: 45687 - DNA, 20 bp, Human herpesvirus 1
tcagtcacaaagcggtcctg

SEQ ID NO: 45688 - DNA, 20 bp, Human herpesvirus 1
gggttcaccgtcgtccgaca

SEQ ID NO: 45689 - DNA, 20 bp, Human herpesvirus 1
ggttcaccgtcgtccgacag

SEQ ID NO: 45690 - DNA, 20 bp, Human herpesvirus 1
accgtcgtccgacaggaccg

SEQ ID NO: 45691 - DNA, 20 bp, Human herpesvirus 1
gtgactgagaacgtgctgtt

SEQ ID NO: 45692 - DNA, 20 bp, Human herpesvirus 1
ttccagtagctggtgatgca

SEQ ID NO: 45693 - DNA, 20 bp, Human herpesvirus 1
cagtagctggtgatgcactg

SEQ ID NO: 45694 - DNA, 20 bp, Human herpesvirus 1
tgcgccctggcccggctcgt

SEQ ID NO: 45695 - DNA, 20 bp, Human herpesvirus 1
tccagcagcacgtgcagcat

SEQ ID NO: 45696 - DNA, 20 bp, Human herpesvirus 1
ccagcagcacgtgcagcatc

SEQ ID NO: 45697 - DNA, 20 bp, Human herpesvirus 1
cagcagcacgtgcagcatct

SEQ ID NO: 45698 - DNA, 20 bp, Human herpesvirus 1
gagcgcggcacggccgacca

SEQ ID NO: 45699 - DNA, 20 bp, Human herpesvirus 1
agcgcggcacggccgaccag

SEQ ID NO: 45700 - DNA, 20 bp, Human herpesvirus 1
caatacgaccccagcagggc

SEQ ID NO: 45701 - DNA, 20 bp, Human herpesvirus 1
gacgccctgctggggtcgta

SEQ ID NO: 45702 - DNA, 20 bp, Human herpesvirus 1
caacaccctgtcgctcgtgc

SEQ ID NO: 45703 - DNA, 20 bp, Human herpesvirus 1
ctggagctcgggttgtcggt

SEQ ID NO: 45704 - DNA, 20 bp, Human herpesvirus 1
tggagctcgggttgtcggtg

SEQ ID NO: 45705 - DNA, 20 bp, Human herpesvirus 1
ggttggtggcgataaagtgg

SEQ ID NO: 45706 - DNA, 20 bp, Human herpesvirus 1
gttggtggcgataaagtgga

SEQ ID NO: 45707 - DNA, 20 bp, Human herpesvirus 1
gtggcgataaagtggaaaag

SEQ ID NO: 45708 - DNA, 20 bp, Human herpesvirus 1
ttgggaggcacggccctgtg

SEQ ID NO: 45709 - DNA, 20 bp, Human herpesvirus 1
tgggaggcacggccctgtgt

SEQ ID NO: 45710 - DNA, 20 bp, Human herpesvirus 1
cgtcgccgcccgcgatggag

SEQ ID NO: 45711 - DNA, 20 bp, Human herpesvirus 1
gctacgccaccaccatgcac

SEQ ID NO: 45712 - DNA, 20 bp, Human herpesvirus 1
gaccggggtctcggatcggg

SEQ ID NO: 45713 - DNA, 20 bp, Human herpesvirus 1
gcgtgggcggcgttcacgaa

SEQ ID NO: 45714 - DNA, 20 bp, Human herpesvirus 1
cgtgggcggcgttcacgaaa

SEQ ID NO: 45715 - DNA, 20 bp, Human herpesvirus 1
acgaaagcaaaacccgacgt

SEQ ID NO: 45716 - DNA, 20 bp, Human herpesvirus 1
ggcgccagaagagagggggg

SEQ ID NO: 45717 - DNA, 20 bp, Human herpesvirus 1
tggcgcctaacggggctgct

SEQ ID NO: 45718 - DNA, 20 bp, Human herpesvirus 1
ggccaggcggtcgatgtgtc

SEQ ID NO: 45719 - DNA, 20 bp, Human herpesvirus 1
gccaggcggtcgatgtgtct

SEQ ID NO: 45720 - DNA, 20 bp, Human herpesvirus 1
cccggcacaaacatcgtgtt

SEQ ID NO: 45721 - DNA, 20 bp, Human herpesvirus 1
ggggcccttccggaggacag

SEQ ID NO: 45722 - DNA, 20 bp, Human herpesvirus 1
cggaggacagacacatcgac

SEQ ID NO: 45723 - DNA, 20 bp, Human herpesvirus 1
tacaaggcgctggccgaaga

SEQ ID NO: 45724 - DNA, 20 bp, Human herpesvirus 1
cacgccaccaagatctgcgg

SEQ ID NO: 45725 - DNA, 20 bp, Human herpesvirus 1
acgccaccaagatctgcggc

SEQ ID NO: 45726 - DNA, 20 bp, Human herpesvirus 1
acgctgttaagcgggtcgct

SEQ ID NO: 45727 - DNA, 20 bp, Human herpesvirus 1
agcgggtcgctgcagggtcg

SEQ ID NO: 45728 - DNA, 20 bp, Human herpesvirus 1
cgttccttccccctcccccc

SEQ ID NO: 45729 - DNA, 20 bp, Human herpesvirus 1
gttccttccccctccccccg

SEQ ID NO: 45730 - DNA, 20 bp, Human herpesvirus 1
cttccccctccccccgcgtc

SEQ ID NO: 45731 - DNA, 20 bp, Human herpesvirus 1
cccctccccccgcgtcagac

SEQ ID NO: 45732 - DNA, 20 bp, Human herpesvirus 1
agcggtggttagggtttgtc

SEQ ID NO: 45733 - DNA, 20 bp, Human herpesvirus 1
atagtcgccgattcccgaaa

SEQ ID NO: 45734 - DNA, 20 bp, Human herpesvirus 1
ccgaaacttcatcacccccg

SEQ ID NO: 45735 - DNA, 20 bp, Human herpesvirus 1
atcacccccgagttcccccg

SEQ ID NO: 45736 - DNA, 20 bp, Human herpesvirus 1
ccccgggacttttggatgtc

SEQ ID NO: 45737 - DNA, 20 bp, Human herpesvirus 1
tggatgtcgcccgtctttaa

SEQ ID NO: 45738 - DNA, 20 bp, Human herpesvirus 1
cgggacggccgtatgtccaa

SEQ ID NO: 45739 - DNA, 20 bp, Human herpesvirus 1
gggacggccgtatgtccaag

SEQ ID NO: 45740 - DNA, 20 bp, Human herpesvirus 1
atgacggcgctggtactgtc

SEQ ID NO: 45741 - DNA, 20 bp, Human herpesvirus 1
gacatacggccgtcccgaaa

SEQ ID NO: 45742 - DNA, 20 bp, Human herpesvirus 1
gcctcgtcaaagtcgccgcc

SEQ ID NO: 45743 - DNA, 20 bp, Human herpesvirus 1
gacgaggccaagctagccga

SEQ ID NO: 45744 - DNA, 20 bp, Human herpesvirus 1
acgaggccaagctagccgag

SEQ ID NO: 45745 - DNA, 20 bp, Human herpesvirus 1
aggtcgatgaaggtgctgac

SEQ ID NO: 45746 - DNA, 20 bp, Human herpesvirus 1
gaggagtacgcgtactccca

SEQ ID NO: 45747 - DNA, 20 bp, Human herpesvirus 1
atcgacctcaacatcaccat

SEQ ID NO: 45748 - DNA, 20 bp, Human herpesvirus 1
gggttcagcttgcgggcctc

SEQ ID NO: 45749 - DNA, 20 bp, Human herpesvirus 1
agcttgcgggcctcgttcca

SEQ ID NO: 45750 - DNA, 20 bp, Human herpesvirus 1
cgggcctcgttccacagggt

SEQ ID NO: 45751 - DNA, 20 bp, Human herpesvirus 1
cacagggtcagctcgtgatt

SEQ ID NO: 45752 - DNA, 20 bp, Human herpesvirus 1
gccaggtagtactgcggctg

SEQ ID NO: 45753 - DNA, 20 bp, Human herpesvirus 1
atgtgcgtcgcgttgtacct

SEQ ID NO: 45754 - DNA, 20 bp, Human herpesvirus 1
tacctgcgggcgaagatgcg

SEQ ID NO: 45755 - DNA, 20 bp, Human herpesvirus 1
gcccgcaggtacaacgcgac

SEQ ID NO: 45756 - DNA, 20 bp, Human herpesvirus 1
gtcatggtgcagaccgacgg

SEQ ID NO: 45757 - DNA, 20 bp, Human herpesvirus 1
ggctggttggaccccggggg

SEQ ID NO: 45758 - DNA, 20 bp, Human herpesvirus 1
gaccccgggggcttgccgtt

SEQ ID NO: 45759 - DNA, 20 bp, Human herpesvirus 1
ccgttggggaagatggccgc

SEQ ID NO: 45760 - DNA, 20 bp, Human herpesvirus 1
gggaagatggccgcgtggaa

SEQ ID NO: 45761 - DNA, 20 bp, Human herpesvirus 1
agcagaaagcccagcggtcc

SEQ ID NO: 45762 - DNA, 20 bp, Human herpesvirus 1
ttaaacatgtccatcacgcg

SEQ ID NO: 45763 - DNA, 20 bp, Human herpesvirus 1
aacatgtccatcacgcgccg

SEQ ID NO: 45764 - DNA, 20 bp, Human herpesvirus 1
gaattgattgcgaaagttgc

SEQ ID NO: 45765 - DNA, 20 bp, Human herpesvirus 1
attgcgaaagttgcgcccct

SEQ ID NO: 45766 - DNA, 20 bp, Human herpesvirus 1
cgaaagttgcgcccctcgac

SEQ ID NO: 45767 - DNA, 20 bp, Human herpesvirus 1
ggccatgacgcgctcggtcg

SEQ ID NO: 45768 - DNA, 20 bp, Human herpesvirus 1
ccttgtccgagcctcccagg

SEQ ID NO: 45769 - DNA, 20 bp, Human herpesvirus 1
tccgagcctcccaggtgcag

SEQ ID NO: 45770 - DNA, 20 bp, Human herpesvirus 1
ctgcacctgggaggctcgga

SEQ ID NO: 45771 - DNA, 20 bp, Human herpesvirus 1
tgcacctgggaggctcggac

SEQ ID NO: 45772 - DNA, 20 bp, Human herpesvirus 1
atggtggttgccgtcttggg

SEQ ID NO: 45773 - DNA, 20 bp, Human herpesvirus 1
ccgtcttgggctttgtctcc

SEQ ID NO: 45774 - DNA, 20 bp, Human herpesvirus 1
ggctttgtctccatgtcctt

SEQ ID NO: 45775 - DNA, 20 bp, Human herpesvirus 1
gtctccatgtccttttgtca

SEQ ID NO: 45776 - DNA, 20 bp, Human herpesvirus 1
tctccatgtccttttgtcaa

SEQ ID NO: 45777 - DNA, 20 bp, Human herpesvirus 1
taccgcgtctacgtccgaag

SEQ ID NO: 45778 - DNA, 20 bp, Human herpesvirus 1
accgcgtctacgtccgaagc

SEQ ID NO: 45779 - DNA, 20 bp, Human herpesvirus 1
ccgcgtctacgtccgaagcg

SEQ ID NO: 45780 - DNA, 20 bp, Human herpesvirus 1
tcgcacaggtacgacagcac

SEQ ID NO: 45781 - DNA, 20 bp, Human herpesvirus 1
ggacgtagacgcggtaaaac

SEQ ID NO: 45782 - DNA, 20 bp, Human herpesvirus 1
cccagagcagccccgaggag

SEQ ID NO: 45783 - DNA, 20 bp, Human herpesvirus 1
tccaggagcacggcctcctc

SEQ ID NO: 45784 - DNA, 20 bp, Human herpesvirus 1
cgcatggcgagccagtcccg

SEQ ID NO: 45785 - DNA, 20 bp, Human herpesvirus 1
gcatggcgagccagtcccgc

SEQ ID NO: 45786 - DNA, 20 bp, Human herpesvirus 1
ctgccccccatcaaactcga

SEQ ID NO: 45787 - DNA, 20 bp, Human herpesvirus 1
tgccccccatcaaactcgag

SEQ ID NO: 45788 - DNA, 20 bp, Human herpesvirus 1
gatggggggcagaaacagcg

SEQ ID NO: 45789 - DNA, 20 bp, Human herpesvirus 1
atggggggcagaaacagcgc

SEQ ID NO: 45790 - DNA, 20 bp, Human herpesvirus 1
tcgcccacggccgtcagccc

SEQ ID NO: 45791 - DNA, 20 bp, Human herpesvirus 1
ttttacccggaccccactta

SEQ ID NO: 45792 - DNA, 20 bp, Human herpesvirus 1
tacccggaccccacttacgg

SEQ ID NO: 45793 - DNA, 20 bp, Human herpesvirus 1
acccggaccccacttacggg

SEQ ID NO: 45794 - DNA, 20 bp, Human herpesvirus 1
cccggaccccacttacgggg

SEQ ID NO: 45795 - DNA, 20 bp, Human herpesvirus 1
cgggggccacatgctgtacg

SEQ ID NO: 45796 - DNA, 20 bp, Human herpesvirus 1
agagccaggaggctgggatc

SEQ ID NO: 45797 - DNA, 20 bp, Human herpesvirus 1
gagcgcgcgtatgtggcctt

SEQ ID NO: 45798 - DNA, 20 bp, Human herpesvirus 1
gatcccagcctcctggctct

SEQ ID NO: 45799 - DNA, 20 bp, Human herpesvirus 1
acgaggctctctgcgccgag

SEQ ID NO: 45800 - DNA, 20 bp, Human herpesvirus 1
gtgcgcatgccccgcgtgca

SEQ ID NO: 45801 - DNA, 20 bp, Human herpesvirus 1
tgcgcatgccccgcgtgcag

SEQ ID NO: 45802 - DNA, 20 bp, Human herpesvirus 1
cgttctatcagcccttggtt

SEQ ID NO: 45803 - DNA, 20 bp, Human herpesvirus 1
tatcagcccttggttggcgg

SEQ ID NO: 45804 - DNA, 20 bp, Human herpesvirus 1
gttggcggcgtccgtcagga

SEQ ID NO: 45805 - DNA, 20 bp, Human herpesvirus 1
gcggcgtccgtcaggacgga

SEQ ID NO: 45806 - DNA, 20 bp, Human herpesvirus 1
ggagcgtgtacgacaggggg

SEQ ID NO: 45807 - DNA, 20 bp, Human herpesvirus 1
tgtctccagcaggcccgccg

SEQ ID NO: 45808 - DNA, 20 bp, Human herpesvirus 1
ttcggggagcccgcggcggg

SEQ ID NO: 45809 - DNA, 20 bp, Human herpesvirus 1
ggggagcccgcggcgggcct

SEQ ID NO: 45810 - DNA, 20 bp, Human herpesvirus 1
ttcgccggcccgtgggccct

SEQ ID NO: 45811 - DNA, 20 bp, Human herpesvirus 1
cgagcaccggtgaccacgat

SEQ ID NO: 45812 - DNA, 20 bp, Human herpesvirus 1
catcgtggagtgcggtgggg

SEQ ID NO: 45813 - DNA, 20 bp, Human herpesvirus 1
gcgcccgacctggagccggg

SEQ ID NO: 45814 - DNA, 20 bp, Human herpesvirus 1
cccgcccggtcgagttcgcc

SEQ ID NO: 45815 - DNA, 20 bp, Human herpesvirus 1
gccctgcgtgtgttggcctg

SEQ ID NO: 45816 - DNA, 20 bp, Human herpesvirus 1
gcctgggcccgggactttgg

SEQ ID NO: 45817 - DNA, 20 bp, Human herpesvirus 1
ctcaccagggccaagaaccg

SEQ ID NO: 45818 - DNA, 20 bp, Human herpesvirus 1
cacgaacggggcggggaaga

SEQ ID NO: 45819 - DNA, 20 bp, Human herpesvirus 1
cccgccccgttcgtgcaaga

SEQ ID NO: 45820 - DNA, 20 bp, Human herpesvirus 1
gtgcaagagggcctccggtt

SEQ ID NO: 45821 - DNA, 20 bp, Human herpesvirus 1
ttggccctggtgagtaatcg

SEQ ID NO: 45822 - DNA, 20 bp, Human herpesvirus 1
ggctgtggggtgggtggttc

SEQ ID NO: 45823 - DNA, 20 bp, Human herpesvirus 1
gctgtggggtgggtggttcc

SEQ ID NO: 45824 - DNA, 20 bp, Human herpesvirus 1
cgccttgcgtgagtgtcctt

SEQ ID NO: 45825 - DNA, 20 bp, Human herpesvirus 1
cgtgagtgtcctttcgaccc

SEQ ID NO: 45826 - DNA, 20 bp, Human herpesvirus 1
cgacccccccccccctccct

SEQ ID NO: 45827 - DNA, 20 bp, Human herpesvirus 1
tgggtttcactgaaactggc

SEQ ID NO: 45828 - DNA, 20 bp, Human herpesvirus 1
gggtttcactgaaactggcc

SEQ ID NO: 45829 - DNA, 20 bp, Human herpesvirus 1
ggtttcactgaaactggccc

SEQ ID NO: 45830 - DNA, 20 bp, Human herpesvirus 1
cactgaaactggcccgcgcc

SEQ ID NO: 45831 - DNA, 20 bp, Human herpesvirus 1
actgaaactggcccgcgccc

SEQ ID NO: 45832 - DNA, 20 bp, Human herpesvirus 1
aacgactccggccccgggac

SEQ ID NO: 45833 - DNA, 20 bp, Human herpesvirus 1
acgactccggccccgggacc

SEQ ID NO: 45834 - DNA, 20 bp, Human herpesvirus 1
aacgcctgcacgcatagccc

SEQ ID NO: 45835 - DNA, 20 bp, Human herpesvirus 1
cgggcgaggatggcactgac

SEQ ID NO: 45836 - DNA, 20 bp, Human herpesvirus 1
gaggccggatggacgatctc

SEQ ID NO: 45837 - DNA, 20 bp, Human herpesvirus 1
gagccggcgatggccgcccc

SEQ ID NO: 45838 - DNA, 20 bp, Human herpesvirus 1
ctggagcagttgcggaccca

SEQ ID NO: 45839 - DNA, 20 bp, Human herpesvirus 1
tggagcagttgcggacccag

SEQ ID NO: 45840 - DNA, 20 bp, Human herpesvirus 1
cggacccaggcccccccacc

SEQ ID NO: 45841 - DNA, 20 bp, Human herpesvirus 1
ggggagcaggtgttcctgcc

SEQ ID NO: 45842 - DNA, 20 bp, Human herpesvirus 1
gggagcaggtgttcctgccc

SEQ ID NO: 45843 - DNA, 20 bp, Human herpesvirus 1
ctgcccctggaacactcgca

SEQ ID NO: 45844 - DNA, 20 bp, Human herpesvirus 1
agtcggtatcgctggcgcgg

SEQ ID NO: 45845 - DNA, 20 bp, Human herpesvirus 1
cgagtgttccaggggcagga

SEQ ID NO: 45846 - DNA, 20 bp, Human herpesvirus 1
acgcgaccggggccgatagt

SEQ ID NO: 45847 - DNA, 20 bp, Human herpesvirus 1
gagctcggggttaacggcaa

SEQ ID NO: 45848 - DNA, 20 bp, Human herpesvirus 1
acggcaaattttccgtgttc

SEQ ID NO: 45849 - DNA, 20 bp, Human herpesvirus 1
gccgttaaccccgagctcga

SEQ ID NO: 45850 - DNA, 20 bp, Human herpesvirus 1
ccgttaaccccgagctcgaa

SEQ ID NO: 45851 - DNA, 20 bp, Human herpesvirus 1
cggaaggggacacgggctac

SEQ ID NO: 45852 - DNA, 20 bp, Human herpesvirus 1
cggaatttatacccgggccc

SEQ ID NO: 45853 - DNA, 20 bp, Human herpesvirus 1
atacccgggccccatccggg

SEQ ID NO: 45854 - DNA, 20 bp, Human herpesvirus 1
tacccgggccccatccgggg

SEQ ID NO: 45855 - DNA, 20 bp, Human herpesvirus 1
aaggcgacgtgcacggccgc

SEQ ID NO: 45856 - DNA, 20 bp, Human herpesvirus 1
gtctggttcgaggacgacca

SEQ ID NO: 45857 - DNA, 20 bp, Human herpesvirus 1
tctggttcgaggacgaccac

SEQ ID NO: 45858 - DNA, 20 bp, Human herpesvirus 1
gaggacgaccaccaggtgtt

SEQ ID NO: 45859 - DNA, 20 bp, Human herpesvirus 1
aacacctggtggtcgtcctc

SEQ ID NO: 45860 - DNA, 20 bp, Human herpesvirus 1
gacgggggattcacggcccc

SEQ ID NO: 45861 - DNA, 20 bp, Human herpesvirus 1
acgggggattcacggccccc

SEQ ID NO: 45862 - DNA, 20 bp, Human herpesvirus 1
acggcccccgaggtgggcac

SEQ ID NO: 45863 - DNA, 20 bp, Human herpesvirus 1
ctccccgcgggacacacgcg

SEQ ID NO: 45864 - DNA, 20 bp, Human herpesvirus 1
tccccgcgggacacacgcgc

SEQ ID NO: 45865 - DNA, 20 bp, Human herpesvirus 1
tggggggaagtgggcagcgg

SEQ ID NO: 45866 - DNA, 20 bp, Human herpesvirus 1
ccgaggaatgacagcccgtg

SEQ ID NO: 45867 - DNA, 20 bp, Human herpesvirus 1
aagcaacccgcacgggccgc

SEQ ID NO: 45868 - DNA, 20 bp, Human herpesvirus 1
agcaacccgcacgggccgcc

SEQ ID NO: 45869 - DNA, 20 bp, Human herpesvirus 1
cttaaatgcgtggtggcgac

SEQ ID NO: 45870 - DNA, 20 bp, Human herpesvirus 1
accaactcgttggcgcgctg

SEQ ID NO: 45871 - DNA, 20 bp, Human herpesvirus 1
gcgcgctgaagcaggttttt

SEQ ID NO: 45872 - DNA, 20 bp, Human herpesvirus 1
ttgccctcgcagaccgtcac

SEQ ID NO: 45873 - DNA, 20 bp, Human herpesvirus 1
tgccctcgcagaccgtcacg

SEQ ID NO: 45874 - DNA, 20 bp, Human herpesvirus 1
agcgcgccaacgagttggtg

SEQ ID NO: 45875 - DNA, 20 bp, Human herpesvirus 1
ggacggcgggggtggtgcag

SEQ ID NO: 45876 - DNA, 20 bp, Human herpesvirus 1
tgcggaccctctcttctctc

SEQ ID NO: 45877 - DNA, 20 bp, Human herpesvirus 1
gcggaccctctcttctctcc

SEQ ID NO: 45878 - DNA, 20 bp, Human herpesvirus 1
cggaccctctcttctctccc

SEQ ID NO: 45879 - DNA, 20 bp, Human herpesvirus 1
tctcccgggccgcccctatc

SEQ ID NO: 45880 - DNA, 20 bp, Human herpesvirus 1
taggttcaccatgcaggcgt

SEQ ID NO: 45881 - DNA, 20 bp, Human herpesvirus 1
accatgcaggcgtggtacgt

SEQ ID NO: 45882 - DNA, 20 bp, Human herpesvirus 1
gcccgcacgtaccacgcctg

SEQ ID NO: 45883 - DNA, 20 bp, Human herpesvirus 1
tctaacgatgcggggggtgg

SEQ ID NO: 45884 - DNA, 20 bp, Human herpesvirus 1
gagaaccgtggacgacgtac

SEQ ID NO: 45885 - DNA, 20 bp, Human herpesvirus 1
gtcgcgctgagcgtcggggc

SEQ ID NO: 45886 - DNA, 20 bp, Human herpesvirus 1
tgtcagcagtgctttgccgc

SEQ ID NO: 45887 - DNA, 20 bp, Human herpesvirus 1
ggcggcaaagcactgctgac

SEQ ID NO: 45888 - DNA, 20 bp, Human herpesvirus 1
gcggcaaagcactgctgaca

SEQ ID NO: 45889 - DNA, 20 bp, Human herpesvirus 1
ttggccccgacgctcagcgc

SEQ ID NO: 45890 - DNA, 20 bp, Human herpesvirus 1
ataacggcgtacggcctcgt

SEQ ID NO: 45891 - DNA, 20 bp, Human herpesvirus 1
ggtgccagtccgctgcaccg

SEQ ID NO: 45892 - DNA, 20 bp, Human herpesvirus 1
ctgtatctggcgttcgtcgc

SEQ ID NO: 45893 - DNA, 20 bp, Human herpesvirus 1
gtcgccctccaccaacgccg

SEQ ID NO: 45894 - DNA, 20 bp, Human herpesvirus 1
ggcgtcgtgagtcccgccca

SEQ ID NO: 45895 - DNA, 20 bp, Human herpesvirus 1
gcgtcgtgagtcccgcccac

SEQ ID NO: 45896 - DNA, 20 bp, Human herpesvirus 1
tgggcgggactcacgacgcc

SEQ ID NO: 45897 - DNA, 20 bp, Human herpesvirus 1
ctcgtcggacgaggacatgg

SEQ ID NO: 45898 - DNA, 20 bp, Human herpesvirus 1
catgtcctcgtccgacgagg

SEQ ID NO: 45899 - DNA, 20 bp, Human herpesvirus 1
caggtcgtcgcggcggctct

SEQ ID NO: 45900 - DNA, 20 bp, Human herpesvirus 1
ctgcctcaacgccacctggc

SEQ ID NO: 45901 - DNA, 20 bp, Human herpesvirus 1
tgctggtgtgcatggccgtt

SEQ ID NO: 45902 - DNA, 20 bp, Human herpesvirus 1
gctggtgtgcatggccgttt

SEQ ID NO: 45903 - DNA, 20 bp, Human herpesvirus 1
ctggtgtgcatggccgtttc

SEQ ID NO: 45904 - DNA, 20 bp, Human herpesvirus 1
cggcctgccaggtggcgttg

SEQ ID NO: 45905 - DNA, 20 bp, Human herpesvirus 1
cgttcgtcgctggtcgtcgg

SEQ ID NO: 45906 - DNA, 20 bp, Human herpesvirus 1
gtcgctggtcgtcgggcgcc

SEQ ID NO: 45907 - DNA, 20 bp, Human herpesvirus 1
ggtcgaacgaacggccacga

SEQ ID NO: 45908 - DNA, 20 bp, Human herpesvirus 1
gttcgaccgaacagccgtcc

SEQ ID NO: 45909 - DNA, 20 bp, Human herpesvirus 1
gaccgaacagccgtccgggg

SEQ ID NO: 45910 - DNA, 20 bp, Human herpesvirus 1
ctaccagacaagctatcgta

SEQ ID NO: 45911 - DNA, 20 bp, Human herpesvirus 1
tctggtaggaacgaggggcc

SEQ ID NO: 45912 - DNA, 20 bp, Human herpesvirus 1
gtcgttattgatctggacac

SEQ ID NO: 45913 - DNA, 20 bp, Human herpesvirus 1
tcgttattgatctggacacc

SEQ ID NO: 45914 - DNA, 20 bp, Human herpesvirus 1
ttgatctggacacccccacg

SEQ ID NO: 45915 - DNA, 20 bp, Human herpesvirus 1
gggtaatggaaaaggcccta

SEQ ID NO: 45916 - DNA, 20 bp, Human herpesvirus 1
acgggctacgccttcgggaa

SEQ ID NO: 45917 - DNA, 20 bp, Human herpesvirus 1
ccgaaggcgtagcccgttaa

SEQ ID NO: 45918 - DNA, 20 bp, Human herpesvirus 1
acttggctggcttggatggg

SEQ ID NO: 45919 - DNA, 20 bp, Human herpesvirus 1
gctggcttggatggggagta

SEQ ID NO: 45920 - DNA, 20 bp, Human herpesvirus 1
ctcccccgttatcccactcg

SEQ ID NO: 45921 - DNA, 20 bp, Human herpesvirus 1
tcccactcgtcgagggcgcc

SEQ ID NO: 45922 - DNA, 20 bp, Human herpesvirus 1
aacaaagacgccgcgtttcc

SEQ ID NO: 45923 - DNA, 20 bp, Human herpesvirus 1
gttgaacgacaccggggcgc

SEQ ID NO: 45924 - DNA, 20 bp, Human herpesvirus 1
ttgaacgacaccggggcgcc

SEQ ID NO: 45925 - DNA, 20 bp, Human herpesvirus 1
gggggcggttttttctggac

SEQ ID NO: 45926 - DNA, 20 bp, Human herpesvirus 1
tttctggacatgtcggcgga

SEQ ID NO: 45927 - DNA, 20 bp, Human herpesvirus 1
ttctggacatgtcggcggaa

SEQ ID NO: 45928 - DNA, 20 bp, Human herpesvirus 1
tctggacatgtcggcggaat

SEQ ID NO: 45929 - DNA, 20 bp, Human herpesvirus 1
ctggacatgtcggcggaatc

SEQ ID NO: 45930 - DNA, 20 bp, Human herpesvirus 1
gccgcgaacggcgatcagag

SEQ ID NO: 45931 - DNA, 20 bp, Human herpesvirus 1
cttgcggaccacggcccggc

SEQ ID NO: 45932 - DNA, 20 bp, Human herpesvirus 1
ttgcggaccacggcccggcg

SEQ ID NO: 45933 - DNA, 20 bp, Human herpesvirus 1
cggaccacggcccggcgatg

SEQ ID NO: 45934 - DNA, 20 bp, Human herpesvirus 1
ctcgtctgggacctcgggca

SEQ ID NO: 45935 - DNA, 20 bp, Human herpesvirus 1
gcggaggacagccccttgga

SEQ ID NO: 45936 - DNA, 20 bp, Human herpesvirus 1
cggaggacagccccttggag

SEQ ID NO: 45937 - DNA, 20 bp, Human herpesvirus 1
gagagcaccgaggtcgtgga

SEQ ID NO: 45938 - DNA, 20 bp, Human herpesvirus 1
tgatgccaaaatgcggcact

SEQ ID NO: 45939 - DNA, 20 bp, Human herpesvirus 1
cgtcgacggaagtccggggc

SEQ ID NO: 45940 - DNA, 20 bp, Human herpesvirus 1
cgtcgacgcaagcccggccc

SEQ ID NO: 45941 - DNA, 20 bp, Human herpesvirus 1
ctgcttaggcagtgccgcat

SEQ ID NO: 45942 - DNA, 20 bp, Human herpesvirus 1
ggcagtgccgcattttggca

SEQ ID NO: 45943 - DNA, 20 bp, Human herpesvirus 1
aaaccccggggcccgtcgtt

SEQ ID NO: 45944 - DNA, 20 bp, Human herpesvirus 1
ggggtgctcgttggttggca

SEQ ID NO: 45945 - DNA, 20 bp, Human herpesvirus 1
gttggcactcacggtgcggc

SEQ ID NO: 45946 - DNA, 20 bp, Human herpesvirus 1
gcactcacggtgcggcgaat

SEQ ID NO: 45947 - DNA, 20 bp, Human herpesvirus 1
gccgcaccgtgagtgccaac

SEQ ID NO: 45948 - DNA, 20 bp, Human herpesvirus 1
cctcatggccccttttatac

SEQ ID NO: 45949 - DNA, 20 bp, Human herpesvirus 1
ctcatggccccttttatacc

SEQ ID NO: 45950 - DNA, 20 bp, Human herpesvirus 1
tataccccagccgaggacgc

SEQ ID NO: 45951 - DNA, 20 bp, Human herpesvirus 1
ataccccagccgaggacgcg

SEQ ID NO: 45952 - DNA, 20 bp, Human herpesvirus 1
taccccagccgaggacgcgt

SEQ ID NO: 45953 - DNA, 20 bp, Human herpesvirus 1
gggccacgggatttaccgcg

SEQ ID NO: 45954 - DNA, 20 bp, Human herpesvirus 1
accgcggaagagctggacgc

SEQ ID NO: 45955 - DNA, 20 bp, Human herpesvirus 1
ccgcggaagagctggacgcc

SEQ ID NO: 45956 - DNA, 20 bp, Human herpesvirus 1
ccgccgcggctgatggctcg

SEQ ID NO: 45957 - DNA, 20 bp, Human herpesvirus 1
cgcggtaaatcccgtggccc

SEQ ID NO: 45958 - DNA, 20 bp, Human herpesvirus 1
gacagcagccatccagatta

SEQ ID NO: 45959 - DNA, 20 bp, Human herpesvirus 1
acagcagccatccagattac

SEQ ID NO: 45960 - DNA, 20 bp, Human herpesvirus 1
cccccaacgggtaatcgtga

SEQ ID NO: 45961 - DNA, 20 bp, Human herpesvirus 1
acgattacccgttgggggta

SEQ ID NO: 45962 - DNA, 20 bp, Human herpesvirus 1
cccgttgggggtaatctgga

SEQ ID NO: 45963 - DNA, 20 bp, Human herpesvirus 1
ggagctgccgggagaccgct

SEQ ID NO: 45964 - DNA, 20 bp, Human herpesvirus 1
aggcgcctactcagataggt

SEQ ID NO: 45965 - DNA, 20 bp, Human herpesvirus 1
ttctcggccccccgcggccc

SEQ ID NO: 45966 - DNA, 20 bp, Human herpesvirus 1
tcggccccccgcggccccaa

SEQ ID NO: 45967 - DNA, 20 bp, Human herpesvirus 1
tggggccgcggggggccgag

SEQ ID NO: 45968 - DNA, 20 bp, Human herpesvirus 1
ggggccgcggggggccgaga

SEQ ID NO: 45969 - DNA, 20 bp, Human herpesvirus 1
gggccgcggggggccgagaa

SEQ ID NO: 45970 - DNA, 20 bp, Human herpesvirus 1
ccacgcccgaccacacaccc

SEQ ID NO: 45971 - DNA, 20 bp, Human herpesvirus 1
gcatggggggtgtgtggtcg

SEQ ID NO: 45972 - DNA, 20 bp, Human herpesvirus 1
aatacatgcccgggacccat

SEQ ID NO: 45973 - DNA, 20 bp, Human herpesvirus 1
cgggcctcagaacccacccg

SEQ ID NO: 45974 - DNA, 20 bp, Human herpesvirus 1
gccgtttcgggtgggttctg

SEQ ID NO: 45975 - DNA, 20 bp, Human herpesvirus 1
cgggtgggttctgaggcccg

SEQ ID NO: 45976 - DNA, 20 bp, Human herpesvirus 1
gggtgggttctgaggcccgg

SEQ ID NO: 45977 - DNA, 20 bp, Human herpesvirus 1
tgggaagcctcgtgggggct

SEQ ID NO: 45978 - DNA, 20 bp, Human herpesvirus 1
gggaagcctcgtgggggctg

SEQ ID NO: 45979 - DNA, 20 bp, Human herpesvirus 1
ggaagcctcgtgggggctgt

SEQ ID NO: 45980 - DNA, 20 bp, Human herpesvirus 1
ttgccgccacccatcgggga

SEQ ID NO: 45981 - DNA, 20 bp, Human herpesvirus 1
ccgccacccatcggggacct

SEQ ID NO: 45982 - DNA, 20 bp, Human herpesvirus 1
attgggggccggggccacgg

SEQ ID NO: 45983 - DNA, 20 bp, Human herpesvirus 1
ttgggggccggggccacgga

SEQ ID NO: 45984 - DNA, 20 bp, Human herpesvirus 1
ggggccggggccacggattt

SEQ ID NO: 45985 - DNA, 20 bp, Human herpesvirus 1
cctggttagcccggtgttgt

SEQ ID NO: 45986 - DNA, 20 bp, Human herpesvirus 1
ctggttagcccggtgttgtt

SEQ ID NO: 45987 - DNA, 20 bp, Human herpesvirus 1
gtggacgccggggccttggg

SEQ ID NO: 45988 - DNA, 20 bp, Human herpesvirus 1
tggacgccggggccttgggg

SEQ ID NO: 45989 - DNA, 20 bp, Human herpesvirus 1
gggcccgacggcgtagtgga

SEQ ID NO: 45990 - DNA, 20 bp, Human herpesvirus 1
ctccactacgccgtcgggcc

SEQ ID NO: 45991 - DNA, 20 bp, Human herpesvirus 1
gataccagactgaccgtggg

SEQ ID NO: 45992 - DNA, 20 bp, Human herpesvirus 1
cgcgtatgggtcggtgacgc

SEQ ID NO: 45993 - DNA, 20 bp, Human herpesvirus 1
gtcctggggatggccatagc

SEQ ID NO: 45994 - DNA, 20 bp, Human herpesvirus 1
tcctggggatggccatagcc

SEQ ID NO: 45995 - DNA, 20 bp, Human herpesvirus 1
ggcggctatggccatcccca

SEQ ID NO: 45996 - DNA, 20 bp, Human herpesvirus 1
ggcgcgtcaccgacccatac

SEQ ID NO: 45997 - DNA, 20 bp, Human herpesvirus 1
ttcacggggtccgagagacg

SEQ ID NO: 45998 - DNA, 20 bp, Human herpesvirus 1
acggggtccgagagacggac

SEQ ID NO: 45999 - DNA, 20 bp, Human herpesvirus 1
gcgagccgggtcctttatgt

SEQ ID NO: 46000 - DNA, 20 bp, Human herpesvirus 1
atgtcgcccacggacagggt

SEQ ID NO: 46001 - DNA, 20 bp, Human herpesvirus 1
tgtcgcccacggacagggta

SEQ ID NO: 46002 - DNA, 20 bp, Human herpesvirus 1
atcccacggcctcgccagtt

SEQ ID NO: 46003 - DNA, 20 bp, Human herpesvirus 1
tcccacggcctcgccagttt

SEQ ID NO: 46004 - DNA, 20 bp, Human herpesvirus 1
cggtcgaagcctactactcg

SEQ ID NO: 46005 - DNA, 20 bp, Human herpesvirus 1
ggtcgaagcctactactcgg

SEQ ID NO: 46006 - DNA, 20 bp, Human herpesvirus 1
gccgcctcgtcttcgctttc

SEQ ID NO: 46007 - DNA, 20 bp, Human herpesvirus 1
tgtcgggcggatttggggcg

SEQ ID NO: 46008 - DNA, 20 bp, Human herpesvirus 1
ggggcgctcctgatgtggct

SEQ ID NO: 46009 - DNA, 20 bp, Human herpesvirus 1
gggcgctcctgatgtggctg

SEQ ID NO: 46010 - DNA, 20 bp, Human herpesvirus 1
tagcggagcagccacatcag

SEQ ID NO: 46011 - DNA, 20 bp, Human herpesvirus 1
agcggagcagccacatcagg

SEQ ID NO: 46012 - DNA, 20 bp, Influenza A virus
ggataattagcttgatgtta

SEQ ID NO: 46013 - DNA, 20 bp, Influenza A virus
gcttgatgttacaaattggg

SEQ ID NO: 46014 - DNA, 20 bp, Influenza A virus
atgttacaaattgggaacat

SEQ ID NO: 46015 - DNA, 20 bp, Influenza A virus
caaattgggaacataatctc

SEQ ID NO: 46016 - DNA, 20 bp, Influenza A virus
ggaacataatctcaatatgg

SEQ ID NO: 46017 - DNA, 20 bp, Influenza A virus
gtcggcaagtgcttgccatg

SEQ ID NO: 46018 - DNA, 20 bp, Influenza A virus
ccatgatggcaccagttggt

SEQ ID NO: 46019 - DNA, 20 bp, Influenza A virus
gttgacaattggaatttctg

SEQ ID NO: 46020 - DNA, 20 bp, Influenza A virus
acaattggaatttctggccc

SEQ ID NO: 46021 - DNA, 20 bp, Influenza A virus
gaatttctggcccagacaat

SEQ ID NO: 46022 - DNA, 20 bp, Influenza A virus
aatgcccctaattatcacta

SEQ ID NO: 46023 - DNA, 20 bp, Influenza A virus
tcactatgaggagtgctcct

SEQ ID NO: 46024 - DNA, 20 bp, Influenza A virus
tcctgatgctggcgaaatca

SEQ ID NO: 46025 - DNA, 20 bp, Influenza A virus
gcatggctcaaatcggccat

SEQ ID NO: 46026 - DNA, 20 bp, Influenza A virus
gagccatgccaattatccct

SEQ ID NO: 46027 - DNA, 20 bp, Influenza A virus
ggatcgggagaaccaaaagc

SEQ ID NO: 46028 - DNA, 20 bp, Influenza A virus
gatcgggagaaccaaaagca

SEQ ID NO: 46029 - DNA, 20 bp, Influenza A virus
caggagcggctttgaaatga

SEQ ID NO: 46030 - DNA, 20 bp, Influenza A virus
gaaatgatttgggatccaaa

SEQ ID NO: 46031 - DNA, 20 bp, Influenza A virus
aaatgatttgggatccaaat

SEQ ID NO: 46032 - DNA, 20 bp, Hepatitis B virus
ggacggaaattgcacctgta

SEQ ID NO: 46033 - DNA, 20 bp, Hepatitis B virus
cacctgtattcccatcccat

SEQ ID NO: 46034 - DNA, 20 bp, Hepatitis B virus
ccatcccatcatcctgggct

SEQ ID NO: 46035 - DNA, 20 bp, Hepatitis B virus
cggaaaattcctatgggagt

SEQ ID NO: 46036 - DNA, 20 bp, Hepatitis B virus
ggaaaattcctatgggagtg

SEQ ID NO: 46037 - DNA, 20 bp, Hepatitis B virus
ctctctaaattttatgggtt

SEQ ID NO: 46038 - DNA, 20 bp, Hepatitis B virus
tatgggttatgtcattggat

SEQ ID NO: 46039 - DNA, 20 bp, Hepatitis B virus
atgggttatgtcattggatg

SEQ ID NO: 46040 - DNA, 20 bp, Hepatitis B virus
tgggttatgtcattggatgt

SEQ ID NO: 46041 - DNA, 20 bp, Hepatitis B virus
tgtcattggatgttatgggt

SEQ ID NO: 46042 - DNA, 20 bp, Hepatitis B virus
gcttcacctctgcacgtcgc

SEQ ID NO: 46043 - DNA, 20 bp, Hepatitis B virus
acctctgcacgtcgcatgga

SEQ ID NO: 46044 - DNA, 20 bp, Hepatitis B virus
cccaaggtcttacataagag

SEQ ID NO: 46045 - DNA, 20 bp, Hepatitis B virus
cataagaggactcttggact

SEQ ID NO: 46046 - DNA, 20 bp, Hepatitis B virus
gactctcagcaatgtcaacg

SEQ ID NO: 46047 - DNA, 20 bp, Hepatitis B virus
ttcacctcaccatactgcac

SEQ ID NO: 46048 - DNA, 20 bp, Hepatitis B virus
acctcaccatactgcactca

SEQ ID NO: 46049 - DNA, 20 bp, Hepatitis B virus
tttgctggggggaactaatg

SEQ ID NO: 46050 - DNA, 20 bp, Hepatitis B virus
gctggggggaactaatgact

SEQ ID NO: 46051 - DNA, 20 bp, Hepatitis B virus
ctggggggaactaatgactc

SEQ ID NO: 46052 - DNA, 20 bp, Hepatitis B virus
tgtgggtcaccatattcttg

SEQ ID NO: 46053 - DNA, 20 bp, Hepatitis B virus
gtgggtcaccatattcttgg

SEQ ID NO: 46054 - DNA, 20 bp, Hepatitis B virus
tgggtcaccatattcttggg

SEQ ID NO: 46055 - DNA, 20 bp, Hepatitis B virus
ttgggaacaagatctacagc

SEQ ID NO: 46056 - DNA, 20 bp, Hepatitis B virus
ggaacaagatctacagcatg

SEQ ID NO: 46057 - DNA, 20 bp, Influenza A virus
agaagtacacatcggggaga

SEQ ID NO: 46058 - DNA, 20 bp, Influenza A virus
tcctgtctccccgatgtgta

SEQ ID NO: 46059 - DNA, 20 bp, Influenza A virus
cctgtctccccgatgtgtac

SEQ ID NO: 46060 - DNA, 20 bp, Influenza A virus
ctgtctccccgatgtgtact

SEQ ID NO: 46061 - DNA, 20 bp, Influenza A virus
ttaattatggccatatggtc

SEQ ID NO: 46062 - DNA, 20 bp, Influenza A virus
ggctgtaacatggtggaata

SEQ ID NO: 46063 - DNA, 20 bp, Influenza A virus
gctgtaacatggtggaatag

SEQ ID NO: 46064 - DNA, 20 bp, Influenza A virus
cccaaaagtatacaagactt

SEQ ID NO: 46065 - DNA, 20 bp, Influenza A virus
tcaaaataagtcttgtatac

SEQ ID NO: 46066 - DNA, 20 bp, Influenza A virus
tatacttttgggtaatggac

SEQ ID NO: 46067 - DNA, 20 bp, Influenza A virus
attggagatgtgccacagca

SEQ ID NO: 46068 - DNA, 20 bp, Influenza A virus
ttggagatgtgccacagcac

SEQ ID NO: 46069 - DNA, 20 bp, Influenza A virus
gagatgtgccacagcacaca

SEQ ID NO: 46070 - DNA, 20 bp, Influenza A virus
tcccgccaatttgtgtgctg

SEQ ID NO: 46071 - DNA, 20 bp, Influenza A virus
gtgtgctgtggcacatctcc

SEQ ID NO: 46072 - DNA, 20 bp, Influenza A virus
caggcaatctccaaacattg

SEQ ID NO: 46073 - DNA, 20 bp, Influenza A virus
aagataagagtacatgaggg

SEQ ID NO: 46074 - DNA, 20 bp, Influenza A virus
acaatggtggggaaaagagc

SEQ ID NO: 46075 - DNA, 20 bp, Influenza A virus
ctcttttccccaccattgtg

SEQ ID NO: 46076 - DNA, 20 bp, Influenza A virus
tccccaccattgtgaactcc

SEQ ID NO: 46077 - DNA, 20 bp, Influenza A virus
aaccccatgcatcagctttt

SEQ ID NO: 46078 - DNA, 20 bp, Influenza A virus
taaggcattttcagaaagat

SEQ ID NO: 46079 - DNA, 20 bp, Influenza A virus
aaggcattttcagaaagatg

SEQ ID NO: 46080 - DNA, 20 bp, Influenza A virus
aggcattttcagaaagatgc

SEQ ID NO: 46081 - DNA, 20 bp, Influenza A virus
tcagaaagatgcgaaagtgc

SEQ ID NO: 46082 - DNA, 20 bp, Influenza A virus
gagaccaacgcgggaatgta

SEQ ID NO: 46083 - DNA, 20 bp, Influenza A virus
ttgtctcctgaggaggtcag

SEQ ID NO: 46084 - DNA, 20 bp, Influenza A virus
tctcctgaggaggtcagtga

SEQ ID NO: 46085 - DNA, 20 bp, Influenza A virus
acaataacatattcatcgtc

SEQ ID NO: 46086 - DNA, 20 bp, Influenza A virus
atcgtcgatgatgtgggaga

SEQ ID NO: 46087 - DNA, 20 bp, Influenza A virus
gtcagaactctattccaaca

SEQ ID NO: 46088 - DNA, 20 bp, Influenza A virus
tcagaactctattccaacaa

SEQ ID NO: 46089 - DNA, 20 bp, Influenza A virus
caacaaatgagagacgtact

SEQ ID NO: 46090 - DNA, 20 bp, Influenza A virus
ggacatttgacaccacccag

SEQ ID NO: 46091 - DNA, 20 bp, Influenza A virus
gacaccacccagataataaa

SEQ ID NO: 46092 - DNA, 20 bp, Influenza A virus
aattgaagacccagatgaaa

SEQ ID NO: 46093 - DNA, 20 bp, Influenza A virus
attgaagacccagatgaaag

SEQ ID NO: 46094 - DNA, 20 bp, Influenza A virus
aagacccagatgaaagcaca

SEQ ID NO: 46095 - DNA, 20 bp, Influenza A virus
agagggtttctcattatagg

SEQ ID NO: 46096 - DNA, 20 bp, Influenza A virus
ctcattataggtaaggaaga

SEQ ID NO: 46097 - DNA, 20 bp, Human papillomavirus type 178
ctttgccttgcattttctgt

SEQ ID NO: 46098 - DNA, 20 bp, Human papillomavirus type 178
gccttgcattttctgtcgtc

SEQ ID NO: 46099 - DNA, 20 bp, Human papillomavirus type 178
ccttgcattttctgtcgtcg

SEQ ID NO: 46100 - DNA, 20 bp, Human papillomavirus type 178
cattttctgtcgtcgtgatt

SEQ ID NO: 46101 - DNA, 20 bp, Human papillomavirus type 178
tctgtcgtcgtgatttgtgt

SEQ ID NO: 46102 - DNA, 20 bp, Human papillomavirus type 178
tgtatggggttgcttactaa

SEQ ID NO: 46103 - DNA, 20 bp, Human papillomavirus type 178
gtatggggttgcttactaat

SEQ ID NO: 46104 - DNA, 20 bp, Human papillomavirus type 178
tatggggttgcttactaatg

SEQ ID NO: 46105 - DNA, 20 bp, Human papillomavirus type 178
cttactaatgaggagaagat

SEQ ID NO: 46106 - DNA, 20 bp, Human papillomavirus type 178
ctaatgaggagaagattgat

SEQ ID NO: 46107 - DNA, 20 bp, Human papillomavirus type 178
acagctgttgcgacaactgt

SEQ ID NO: 46108 - DNA, 20 bp, Human papillomavirus type 178
cgacaactgttgccgagtaa

SEQ ID NO: 46109 - DNA, 20 bp, Human papillomavirus type 178
ccgagtaattcgtgtcgttg

SEQ ID NO: 46110 - DNA, 20 bp, Human papillomavirus type 178
gtgtcgttgttgttgctact

SEQ ID NO: 46111 - DNA, 20 bp, Human papillomavirus type 178
ttgttgctactgaaactggc

SEQ ID NO: 46112 - DNA, 20 bp, Human papillomavirus type 178
gatgacagtacagaatcaaa

SEQ ID NO: 46113 - DNA, 20 bp, Human papillomavirus type 178
atgacagtacagaatcaaac

SEQ ID NO: 46114 - DNA, 20 bp, Human papillomavirus type 178
gacgacagtgatgaggtgga

SEQ ID NO: 46115 - DNA, 20 bp, Human papillomavirus type 178
attaaacagagccagggtat

SEQ ID NO: 46116 - DNA, 20 bp, Human papillomavirus type 178
aacagagccagggtattccc

SEQ ID NO: 46117 - DNA, 20 bp, Human papillomavirus type 178
agcaggatgaagctgaaaat

SEQ ID NO: 46118 - DNA, 20 bp, Human papillomavirus type 178
tacgtcgcaggtagagatcg

SEQ ID NO: 46119 - DNA, 20 bp, Human papillomavirus type 178
acgtcgcaggtagagatcgc

SEQ ID NO: 46120 - DNA, 20 bp, Human papillomavirus type 178
cgtcgcaggtagagatcgcc

SEQ ID NO: 46121 - DNA, 20 bp, Human papillomavirus type 178
gataatagtaatgttagtac

SEQ ID NO: 46122 - DNA, 20 bp, Human papillomavirus type 178
ttagacaagaaaatgtgtat

SEQ ID NO: 46123 - DNA, 20 bp, Human papillomavirus type 178
gacaagaaaatgtgtattta

SEQ ID NO: 46124 - DNA, 20 bp, Human papillomavirus type 178
atattatgggagaaaagaag

SEQ ID NO: 46125 - DNA, 20 bp, Human papillomavirus type 178
tattatgggagaaaagaagg

SEQ ID NO: 46126 - DNA, 20 bp, Human papillomavirus type 178
tgggagaaaagaaggcctca

SEQ ID NO: 46127 - DNA, 20 bp, Human papillomavirus type 178
tcccctcactccgggaagaa

SEQ ID NO: 46128 - DNA, 20 bp, Human papillomavirus type 178
ccagtcccaccgaaaacacc

SEQ ID NO: 46129 - DNA, 20 bp, Human papillomavirus type 178
cagtcccaccgaaaacaccg

SEQ ID NO: 46130 - DNA, 20 bp, Human papillomavirus type 178
ttggagtcgtcctgggcttt

SEQ ID NO: 46131 - DNA, 20 bp, Human papillomavirus type 178
tggagtcgtcctgggctttc

SEQ ID NO: 46132 - DNA, 20 bp, Human papillomavirus type 178
ttaaaaattataggtagtgt

SEQ ID NO: 46133 - DNA, 20 bp, Human papillomavirus type 178
aaaattataggtagtgttgt

SEQ ID NO: 46134 - DNA, 20 bp, Human papillomavirus type 178
taggtagtgttgtttatttt

SEQ ID NO: 46135 - DNA, 20 bp, Human papillomavirus type 178
tttattttggaggactgggt

SEQ ID NO: 46136 - DNA, 20 bp, Human papillomavirus type 178
attttggaggactgggtata

SEQ ID NO: 46137 - DNA, 20 bp, Human papillomavirus type 178
atgctggctcagcagaacca

SEQ ID NO: 46138 - DNA, 20 bp, Human papillomavirus type 178
caactatagatcctatatca

SEQ ID NO: 46139 - DNA, 20 bp, Human papillomavirus type 178
cagcagtagataaccaacct

SEQ ID NO: 46140 - DNA, 20 bp, Human papillomavirus type 178
gttatctactgctgtaacgt

SEQ ID NO: 46141 - DNA, 20 bp, Human papillomavirus type 178
tctactgctgtaacgtctga

SEQ ID NO: 46142 - DNA, 20 bp, Human papillomavirus type 178
gcagtttgatcaagacgtgc

SEQ ID NO: 46143 - DNA, 20 bp, Human papillomavirus type 178
cagtttgatcaagacgtgca

SEQ ID NO: 46144 - DNA, 20 bp, Human papillomavirus type 178
gatcaagacgtgcagaatgt

SEQ ID NO: 46145 - DNA, 20 bp, Human papillomavirus type 178
atcaagacgtgcagaatgta

SEQ ID NO: 46146 - DNA, 20 bp, Human papillomavirus type 178
tgcagatgttatcacagtac

SEQ ID NO: 46147 - DNA, 20 bp, Human papillomavirus type 178
gggacaataggccaacattc

SEQ ID NO: 46148 - DNA, 20 bp, Human papillomavirus type 178
aggcgaaactgcaattgtag

SEQ ID NO: 46149 - DNA, 20 bp, Human papillomavirus type 178
tagatgcagtggcagagagc

SEQ ID NO: 46150 - DNA, 20 bp, Human papillomavirus type 178
gtagatatccctaatagtag

SEQ ID NO: 46151 - DNA, 20 bp, Human papillomavirus type 178
tagatatccctaatagtagt

SEQ ID NO: 46152 - DNA, 20 bp, Human papillomavirus type 178
tcagcacggacgaatacgtg

SEQ ID NO: 46153 - DNA, 20 bp, Human papillomavirus type 178
ttctatgctggtacagaacg

SEQ ID NO: 46154 - DNA, 20 bp, Human papillomavirus type 178
tctatgctggtacagaacgc

SEQ ID NO: 46155 - DNA, 20 bp, Human papillomavirus type 178
ctatgctggtacagaacgct

SEQ ID NO: 46156 - DNA, 20 bp, Human papillomavirus type 178
tatgctggtacagaacgctt

SEQ ID NO: 46157 - DNA, 20 bp, Human papillomavirus type 178
ggggtagccacaacaggcaa

SEQ ID NO: 46158 - DNA, 20 bp, Human papillomavirus type 178
tttaacaaatataatgatac

SEQ ID NO: 46159 - DNA, 20 bp, Human papillomavirus type 178
aacaaatataatgatactga

SEQ ID NO: 46160 - DNA, 20 bp, Human papillomavirus type 178
acaaatataatgatactgaa

SEQ ID NO: 46161 - DNA, 20 bp, Human papillomavirus type 178
tgcctattatcatctgtttg

SEQ ID NO: 46162 - DNA, 20 bp, Human papillomavirus type 178
tgttatacaagatggggata

SEQ ID NO: 46163 - DNA, 20 bp, Human papillomavirus type 178
tacaagatggggatatgtgt

SEQ ID NO: 46164 - DNA, 20 bp, Human papillomavirus type 178
gctttggtgcttgcaatttc

SEQ ID NO: 46165 - DNA, 20 bp, Human papillomavirus type 178
ggtgcttgcaatttcagaac

SEQ ID NO: 46166 - DNA, 20 bp, Human papillomavirus type 178
gtgcttgcaatttcagaaca

SEQ ID NO: 46167 - DNA, 20 bp, Human papillomavirus type 178
caaagattataccttttggc

SEQ ID NO: 46168 - DNA, 20 bp, Human papillomavirus type 178
taccttttggcaaatagata

SEQ ID NO: 46169 - DNA, 20 bp, Human papillomavirus type 178
tggcaaatagatatgactga

SEQ ID NO: 46170 - DNA, 20 bp, Human papillomavirus type 178
ggcaaatagatatgactgaa

SEQ ID NO: 46171 - DNA, 20 bp, Human papillomavirus type 178
gcaaatagatatgactgaac

SEQ ID NO: 46172 - DNA, 20 bp, Human papillomavirus type 178
caaaactgtgaatggtctct

SEQ ID NO: 46173 - DNA, 20 bp, Human papillomavirus type 178
gtctgaataaattgctgatg

SEQ ID NO: 46174 - DNA, 20 bp, Human papillomavirus type 178
tctgaataaattgctgatgc

SEQ ID NO: 46175 - DNA, 20 bp, Human papillomavirus type 178
ctgatgcgcaataatctggt

SEQ ID NO: 46176 - DNA, 20 bp, Human papillomavirus type 178
caattttactgactcatttg

SEQ ID NO: 46177 - DNA, 20 bp, Human papillomavirus type 178
ctggtaagtttttggcgcca

SEQ ID NO: 46178 - DNA, 20 bp, Human papillomavirus type 178
tggtaagtttttggcgccaa

SEQ ID NO: 46179 - DNA, 20 bp, Human papillomavirus type 178
ttggcgccaaagggcaaaaa

SEQ ID NO: 46180 - DNA, 20 bp, Human papillomavirus type 178
tggcgccaaagggcaaaaaa

SEQ ID NO: 46181 - DNA, 20 bp, Human papillomavirus type 178
ggcgccaaagggcaaaaaag

SEQ ID NO: 46182 - DNA, 20 bp, Human papillomavirus type 48
gaagagcttgttttgcctgc

SEQ ID NO: 46183 - DNA, 20 bp, Human papillomavirus type 48
ttttgcctgctaacttaatt

SEQ ID NO: 46184 - DNA, 20 bp, Human papillomavirus type 48
tgcctgctaacttaatttct

SEQ ID NO: 46185 - DNA, 20 bp, Human papillomavirus type 48
gcctgctaacttaatttctg

SEQ ID NO: 46186 - DNA, 20 bp, Human papillomavirus type 48
cctgctaacttaatttctga

SEQ ID NO: 46187 - DNA, 20 bp, Human papillomavirus type 48
tcggcagtgcatataacgcc

SEQ ID NO: 46188 - DNA, 20 bp, Human papillomavirus type 48
aatgatagtggagttgttga

SEQ ID NO: 46189 - DNA, 20 bp, Human papillomavirus type 48
atgatagtggagttgttgaa

SEQ ID NO: 46190 - DNA, 20 bp, Human papillomavirus type 48
ttgaagatgaagctgaaagt

SEQ ID NO: 46191 - DNA, 20 bp, Human papillomavirus type 48
aagatgaagctgaaagtaat

SEQ ID NO: 46192 - DNA, 20 bp, Human papillomavirus type 48
gggtccgactctgcaccaac

SEQ ID NO: 46193 - DNA, 20 bp, Human papillomavirus type 48
ggaagtgggatcaagatcta

SEQ ID NO: 46194 - DNA, 20 bp, Human papillomavirus type 48
caagcgttgtagatcttgat

SEQ ID NO: 46195 - DNA, 20 bp, Human papillomavirus type 48
tagatcttgatcccacttcc

SEQ ID NO: 46196 - DNA, 20 bp, Human papillomavirus type 48
atcccacttccgaaggagtt

SEQ ID NO: 46197 - DNA, 20 bp, Human papillomavirus type 48
gaaatttgggaataggatct

SEQ ID NO: 46198 - DNA, 20 bp, Human papillomavirus type 48
gggaataggatctggaaaag

SEQ ID NO: 46199 - DNA, 20 bp, Human papillomavirus type 48
ggaataggatctggaaaagg

SEQ ID NO: 46200 - DNA, 20 bp, Human papillomavirus type 48
ggatatagaccattaggatc

SEQ ID NO: 46201 - DNA, 20 bp, Human papillomavirus type 48
gatatagaccattaggatcc

SEQ ID NO: 46202 - DNA, 20 bp, Human papillomavirus type 48
caccagatgcaggtccaggt

SEQ ID NO: 46203 - DNA, 20 bp, Human papillomavirus type 48
aactattcacctttagagat

SEQ ID NO: 46204 - DNA, 20 bp, Human papillomavirus type 48
acctttagagatccagcaac

SEQ ID NO: 46205 - DNA, 20 bp, Human papillomavirus type 48
agagatccagcaactgatgt

SEQ ID NO: 46206 - DNA, 20 bp, Human papillomavirus type 48
gagatccagcaactgatgta

SEQ ID NO: 46207 - DNA, 20 bp, Human papillomavirus type 48
tttgcaggagagacaattgg

SEQ ID NO: 46208 - DNA, 20 bp, Human papillomavirus type 48
gcaggagagacaattgggga

SEQ ID NO: 46209 - DNA, 20 bp, Human papillomavirus type 48
caggagagacaattggggac

SEQ ID NO: 46210 - DNA, 20 bp, Human papillomavirus type 48
gggacaacatatttgaagag

SEQ ID NO: 46211 - DNA, 20 bp, Human papillomavirus type 48
gaagagatacccttgcagaa

SEQ ID NO: 46212 - DNA, 20 bp, Human papillomavirus type 48
gatccagatattagtataca

SEQ ID NO: 46213 - DNA, 20 bp, Human papillomavirus type 48
atccagatattagtatacag

SEQ ID NO: 46214 - DNA, 20 bp, Human papillomavirus type 48
gtatacagttccagcgtgat

SEQ ID NO: 46215 - DNA, 20 bp, Human papillomavirus type 48
cagcgtgatgtaaatagcct

SEQ ID NO: 46216 - DNA, 20 bp, Human papillomavirus type 48
tgctgacattgcttatttaa

SEQ ID NO: 46217 - DNA, 20 bp, Human papillomavirus type 48
cagtttctggactttagata

SEQ ID NO: 46218 - DNA, 20 bp, Human papillomavirus type 48
ctggactttagatatgacag

SEQ ID NO: 46219 - DNA, 20 bp, Human papillomavirus type 48
tggactttagatatgacaga

SEQ ID NO: 46220 - DNA, 20 bp, Human papillomavirus type 48
agatatgacagagcgcttct

SEQ ID NO: 46221 - DNA, 20 bp, Human papillomavirus type 48
gatatgacagagcgcttctc

SEQ ID NO: 46222 - DNA, 20 bp, Human papillomavirus type 48
atacgcctccattgggtggg

SEQ ID NO: 46223 - DNA, 20 bp, Human papillomavirus type 48
tacgcctccattgggtgggt

SEQ ID NO: 46224 - DNA, 20 bp, Human papillomavirus type 48
ggtgggttctgacctataaa

SEQ ID NO: 46225 - DNA, 20 bp, Human papillomavirus type 48
tgacctataaactcctgggt

SEQ ID NO: 46226 - DNA, 20 bp, Human papillomavirus type 48
ggtcagcagacgctgaggag

SEQ ID NO: 46227 - DNA, 20 bp, Human immunodeficiency virus 2
gcagaattatactcatgggc

SEQ ID NO: 46228 - DNA, 20 bp, Human immunodeficiency virus 2
tactcatgggccaggagtaa

SEQ ID NO: 46229 - DNA, 20 bp, Human immunodeficiency virus 2
ggtaccttactcctggccca

SEQ ID NO: 46230 - DNA, 20 bp, Human immunodeficiency virus 2
ctcctggcccatgagtataa

SEQ ID NO: 46231 - DNA, 20 bp, Human immunodeficiency virus 2
tgccaatctggtattatccc

SEQ ID NO: 46232 - DNA, 20 bp, Human immunodeficiency virus 2
ccagaaggggctgtaaccaa

SEQ ID NO: 46233 - DNA, 20 bp, Human immunodeficiency virus 2
cagaaggggctgtaaccaag

SEQ ID NO: 46234 - DNA, 20 bp, Human immunodeficiency virus 2
ctgtataaatgtacccgctt

SEQ ID NO: 46235 - DNA, 20 bp, Human immunodeficiency virus 2
ttgcattgtattcagtcgct

SEQ ID NO: 46236 - DNA, 20 bp, Human immunodeficiency virus 2
cattgtattcagtcgctctg

SEQ ID NO: 46237 - DNA, 20 bp, Human immunodeficiency virus 2
gggaatccaaggcaggaaaa

SEQ ID NO: 46238 - DNA, 20 bp, Human immunodeficiency virus 2
ggaatccaaggcaggaaaat

SEQ ID NO: 46239 - DNA, 20 bp, Human immunodeficiency virus 2
gcgcccgaacagggacttga

SEQ ID NO: 46240 - DNA, 20 bp, Human immunodeficiency virus 2
aagaggactgagaagccctg

SEQ ID NO: 46241 - DNA, 20 bp, Human immunodeficiency virus 2
ctgccttcactcagccgagt

SEQ ID NO: 46242 - DNA, 20 bp, Human immunodeficiency virus 2
agagggaaaaaagcagacga

SEQ ID NO: 46243 - DNA, 20 bp, Human immunodeficiency virus 2
gaaaaagttaggttacggcc

SEQ ID NO: 46244 - DNA, 20 bp, Human immunodeficiency virus 2
ggttacggcccggcggaaag

SEQ ID NO: 46245 - DNA, 20 bp, Human immunodeficiency virus 2
cggcccggcggaaagaaaaa

SEQ ID NO: 46246 - DNA, 20 bp, Human immunodeficiency virus 2
aaacatattgtgtgggcagc

SEQ ID NO: 46247 - DNA, 20 bp, Human immunodeficiency virus 2
tacccatgcatttagagttc

SEQ ID NO: 46248 - DNA, 20 bp, Human immunodeficiency virus 2
acccatgcatttagagttcg

SEQ ID NO: 46249 - DNA, 20 bp, Human immunodeficiency virus 2
cccatgcatttagagttcgg

SEQ ID NO: 46250 - DNA, 20 bp, Human immunodeficiency virus 2
agagttcgggggctcagtgg

SEQ ID NO: 46251 - DNA, 20 bp, Human immunodeficiency virus 2
gagttcgggggctcagtggc

SEQ ID NO: 46252 - DNA, 20 bp, Human immunodeficiency virus 2
gttgggttgtactttctgac

SEQ ID NO: 46253 - DNA, 20 bp, Human immunodeficiency virus 2
ggttgtactttctgacacac

SEQ ID NO: 46254 - DNA, 20 bp, Human immunodeficiency virus 2
tactttctgacacacttttg

SEQ ID NO: 46255 - DNA, 20 bp, Human immunodeficiency virus 2
ctgacacacttttgcagccc

SEQ ID NO: 46256 - DNA, 20 bp, Human immunodeficiency virus 2
tgacacacttttgcagccct

SEQ ID NO: 46257 - DNA, 20 bp, Human immunodeficiency virus 2
gcagcagcccaacaaagaaa

SEQ ID NO: 46258 - DNA, 20 bp, Human immunodeficiency virus 2
cagcagcccaacaaagaaag

SEQ ID NO: 46259 - DNA, 20 bp, Human immunodeficiency virus 2
ggtattggaactgtggaaag

SEQ ID NO: 46260 - DNA, 20 bp, Human immunodeficiency virus 2
gaactgtggaaaggagggac

SEQ ID NO: 46261 - DNA, 20 bp, Human immunodeficiency virus 2
ccacacttccagcagccctg

SEQ ID NO: 46262 - DNA, 20 bp, Human immunodeficiency virus 2
ggcagaaatattctgacagc

SEQ ID NO: 46263 - DNA, 20 bp, Human immunodeficiency virus 2
gcagaaatattctgacagcc

SEQ ID NO: 46264 - DNA, 20 bp, Human immunodeficiency virus 2
tgacagccttaggcatgtca

SEQ ID NO: 46265 - DNA, 20 bp, Human immunodeficiency virus 2
ggcatgtcattaaatttacc

SEQ ID NO: 46266 - DNA, 20 bp, Human immunodeficiency virus 2
aatttaccagttgccaagat

SEQ ID NO: 46267 - DNA, 20 bp, Human immunodeficiency virus 2
agctaggaattccacacccg

SEQ ID NO: 46268 - DNA, 20 bp, Human immunodeficiency virus 2
cacacccggcaggactagcc

SEQ ID NO: 46269 - DNA, 20 bp, Human immunodeficiency virus 2
gatgtaggggatgcctattt

SEQ ID NO: 46270 - DNA, 20 bp, Human immunodeficiency virus 2
ttccataccactacatgaag

SEQ ID NO: 46271 - DNA, 20 bp, Human immunodeficiency virus 2
tccataccactacatgaaga

SEQ ID NO: 46272 - DNA, 20 bp, Human immunodeficiency virus 2
taaatggcctagggttttct

SEQ ID NO: 46273 - DNA, 20 bp, Human immunodeficiency virus 2
tctactccagatgagaagtt

SEQ ID NO: 46274 - DNA, 20 bp, Human immunodeficiency virus 2
ctactccagatgagaagttc

SEQ ID NO: 46275 - DNA, 20 bp, Human immunodeficiency virus 2
tactccagatgagaagttcc

SEQ ID NO: 46276 - DNA, 20 bp, Human immunodeficiency virus 2
caaaaagaccctccatttca

SEQ ID NO: 46277 - DNA, 20 bp, Human immunodeficiency virus 2
tcttgagccaggaacaagaa

SEQ ID NO: 46278 - DNA, 20 bp, Human immunodeficiency virus 2
agccaggaacaagaaggata

SEQ ID NO: 46279 - DNA, 20 bp, Human immunodeficiency virus 2
ttaccaagaagaaaaagaat

SEQ ID NO: 46280 - DNA, 20 bp, Human immunodeficiency virus 2
ccaagaagaaaaagaattag

SEQ ID NO: 46281 - DNA, 20 bp, Human immunodeficiency virus 2
gaggcaacaatccaaaaaag

SEQ ID NO: 46282 - DNA, 20 bp, Human immunodeficiency virus 2
acatttaacctagtaggaga

SEQ ID NO: 46283 - DNA, 20 bp, Human immunodeficiency virus 2
aacctagtaggagatcctat

SEQ ID NO: 46284 - DNA, 20 bp, Human immunodeficiency virus 2
acctagtaggagatcctata

SEQ ID NO: 46285 - DNA, 20 bp, Human immunodeficiency virus 2
tacacagatggatcatgcaa

SEQ ID NO: 46286 - DNA, 20 bp, Human immunodeficiency virus 2
tgactgtctattgcatgatc

SEQ ID NO: 46287 - DNA, 20 bp, Human immunodeficiency virus 2
agtaagtcaaggcatcagac

SEQ ID NO: 46288 - DNA, 20 bp, Human immunodeficiency virus 2
gtaagtcaaggcatcagaca

SEQ ID NO: 46289 - DNA, 20 bp, Human immunodeficiency virus 2
ttcctggaaaagatagagcc

SEQ ID NO: 46290 - DNA, 20 bp, Human immunodeficiency virus 2
ctggaaaagatagagcccgc

SEQ ID NO: 46291 - DNA, 20 bp, Human immunodeficiency virus 2
ttcatgttcctcttgagcgg

SEQ ID NO: 46292 - DNA, 20 bp, Human immunodeficiency virus 2
ctattaaaactggccagtag

SEQ ID NO: 46293 - DNA, 20 bp, Human immunodeficiency virus 2
aaactggccagtaggtggcc

SEQ ID NO: 46294 - DNA, 20 bp, Human immunodeficiency virus 2
cacacagacaatggccccaa

SEQ ID NO: 46295 - DNA, 20 bp, Human immunodeficiency virus 2
acttcacaggaagtgaagat

SEQ ID NO: 46296 - DNA, 20 bp, Human immunodeficiency virus 2
acaggaagtgaagatggtgg

SEQ ID NO: 46297 - DNA, 20 bp, Human immunodeficiency virus 2
ccacagaacaagaaatacaa

SEQ ID NO: 46298 - DNA, 20 bp, Human immunodeficiency virus 2
ctccaaagaaaaaattcaaa

SEQ ID NO: 46299 - DNA, 20 bp, Human immunodeficiency virus 2
aaattttaaaaatttccagg

SEQ ID NO: 46300 - DNA, 20 bp, Human immunodeficiency virus 2
taaaaatttccaggtctatt

SEQ ID NO: 46301 - DNA, 20 bp, Human immunodeficiency virus 2
aaaaatttccaggtctatta

SEQ ID NO: 46302 - DNA, 20 bp, Human immunodeficiency virus 2
acctggtatacagaaaagtt

SEQ ID NO: 46303 - DNA, 20 bp, Human immunodeficiency virus 2
tggacagatgttaccccaga

SEQ ID NO: 46304 - DNA, 20 bp, Human immunodeficiency virus 2
ccccagactgtgcagacatc

SEQ ID NO: 46305 - DNA, 20 bp, Human immunodeficiency virus 2
ggatgtctgcacagtctggg

SEQ ID NO: 46306 - DNA, 20 bp, Human immunodeficiency virus 2
tctgtataccaggttaatct

SEQ ID NO: 46307 - DNA, 20 bp, Human immunodeficiency virus 2
tccaggtgtggcaaaggtcc

SEQ ID NO: 46308 - DNA, 20 bp, Human immunodeficiency virus 2
ccaggtgtggcaaaggtcct

SEQ ID NO: 46309 - DNA, 20 bp, Human immunodeficiency virus 2
caggtgtggcaaaggtcctg

SEQ ID NO: 46310 - DNA, 20 bp, Human immunodeficiency virus 2
gcatgatgaacaagggatgt

SEQ ID NO: 46311 - DNA, 20 bp, Human immunodeficiency virus 2
ctgacatcccttgttcatca

SEQ ID NO: 46312 - DNA, 20 bp, Human immunodeficiency virus 2
tgatccccgcttgctaattg

SEQ ID NO: 46313 - DNA, 20 bp, Human immunodeficiency virus 2
gatccccgcttgctaattgc

SEQ ID NO: 46314 - DNA, 20 bp, Human immunodeficiency virus 2
atccccgcttgctaattgct

SEQ ID NO: 46315 - DNA, 20 bp, Human immunodeficiency virus 2
ctaattgctcttggctacta

SEQ ID NO: 46316 - DNA, 20 bp, Human immunodeficiency virus 2
ctcttggctactatatccat

SEQ ID NO: 46317 - DNA, 20 bp, Human immunodeficiency virus 2
gccttctgcaccagacaagt

SEQ ID NO: 46318 - DNA, 20 bp, Human immunodeficiency virus 2
tgcaccagacaagtgagtat

SEQ ID NO: 46319 - DNA, 20 bp, Human immunodeficiency virus 2
gttgtcattttactaacaag

SEQ ID NO: 46320 - DNA, 20 bp, Human immunodeficiency virus 2
ttagtaaaatgacaacaaac

SEQ ID NO: 46321 - DNA, 20 bp, Human immunodeficiency virus 2
gtaaaatgacaacaaacagc

SEQ ID NO: 46322 - DNA, 20 bp, Human immunodeficiency virus 2
gagacatcaataaaaccatg

SEQ ID NO: 46323 - DNA, 20 bp, Human immunodeficiency virus 2
agacatcaataaaaccatgt

SEQ ID NO: 46324 - DNA, 20 bp, Human immunodeficiency virus 2
tagcagggttcaagggaata

SEQ ID NO: 46325 - DNA, 20 bp, Human immunodeficiency virus 2
aagggaataccacgaccccg

SEQ ID NO: 46326 - DNA, 20 bp, Human immunodeficiency virus 2
ggggtcgtggtattcccttg

SEQ ID NO: 46327 - DNA, 20 bp, Human immunodeficiency virus 2
gtgacaacacaacagctggc

SEQ ID NO: 46328 - DNA, 20 bp, Human immunodeficiency virus 2
tgacaacacaacagctggca

SEQ ID NO: 46329 - DNA, 20 bp, Human immunodeficiency virus 2
catgagacattgcaacacat

SEQ ID NO: 46330 - DNA, 20 bp, Human immunodeficiency virus 2
caacacatcaatcatcaaag

SEQ ID NO: 46331 - DNA, 20 bp, Human immunodeficiency virus 2
ggatgctatgaggtttagat

SEQ ID NO: 46332 - DNA, 20 bp, Human immunodeficiency virus 2
taccaataacacttatgtca

SEQ ID NO: 46333 - DNA, 20 bp, Human immunodeficiency virus 2
accaataacacttatgtcag

SEQ ID NO: 46334 - DNA, 20 bp, Human immunodeficiency virus 2
ccaataacacttatgtcagg

SEQ ID NO: 46335 - DNA, 20 bp, Human immunodeficiency virus 2
tgtcaggattagtgtttcac

SEQ ID NO: 46336 - DNA, 20 bp, Human immunodeficiency virus 2
gtgtttcactctcagccaat

SEQ ID NO: 46337 - DNA, 20 bp, Human immunodeficiency virus 2
ccatataaagcagataatta

SEQ ID NO: 46338 - DNA, 20 bp, Human immunodeficiency virus 2
atacctggcataaagtaggg

SEQ ID NO: 46339 - DNA, 20 bp, Human immunodeficiency virus 2
gcctcctagggaaggggagt

SEQ ID NO: 46340 - DNA, 20 bp, Human immunodeficiency virus 2
cctcctagggaaggggagtt

SEQ ID NO: 46341 - DNA, 20 bp, Human immunodeficiency virus 2
gcctgtgaatcaacagtaac

SEQ ID NO: 46342 - DNA, 20 bp, Human immunodeficiency virus 2
atggggatgtgcgtttagac

SEQ ID NO: 46343 - DNA, 20 bp, Human immunodeficiency virus 2
agacaggtctgccacactac

SEQ ID NO: 46344 - DNA, 20 bp, Human immunodeficiency virus 2
gacaggtctgccacactact

SEQ ID NO: 46345 - DNA, 20 bp, Human immunodeficiency virus 2
atcgcctgactggaaaaata

SEQ ID NO: 46346 - DNA, 20 bp, Human immunodeficiency virus 2
tcgcctgactggaaaaatat

SEQ ID NO: 46347 - DNA, 20 bp, Human immunodeficiency virus 2
aggcggcccaactgcaatat

SEQ ID NO: 46348 - DNA, 20 bp, Human immunodeficiency virus 2
ttggatccactcgcacccat

SEQ ID NO: 46349 - DNA, 20 bp, Human immunodeficiency virus 2
gatccactcgcacccatatt

SEQ ID NO: 46350 - DNA, 20 bp, Human immunodeficiency virus 2
cagttgggccgccttaagtc

SEQ ID NO: 46351 - DNA, 20 bp, Human immunodeficiency virus 2
ggccgccttaagtctcagcc

SEQ ID NO: 46352 - DNA, 20 bp, Human immunodeficiency virus 2
gtataggcagcaaaatatgg

SEQ ID NO: 46353 - DNA, 20 bp, Human immunodeficiency virus 2
tataggcagcaaaatatgga

SEQ ID NO: 46354 - DNA, 20 bp, Human immunodeficiency virus 2
tgatgatgatgacctaatag

SEQ ID NO: 46355 - DNA, 20 bp, Human immunodeficiency virus 2
ctgttacaccaagagtacca

SEQ ID NO: 46356 - DNA, 20 bp, Human immunodeficiency virus 2
caccaagagtaccacggaga

SEQ ID NO: 46357 - DNA, 20 bp, Human immunodeficiency virus 2
gtgtggcagtttgactccat

SEQ ID NO: 46358 - DNA, 20 bp, Human immunodeficiency virus 2
gactccatgctggcctataa

SEQ ID NO: 46359 - DNA, 20 bp, Human immunodeficiency virus 2
actccatgctggcctataac

SEQ ID NO: 46360 - DNA, 20 bp, Human immunodeficiency virus 2
actctgtacccagaagagtt

SEQ ID NO: 46361 - DNA, 20 bp, Human immunodeficiency virus 2
gggcacaagtcaggattgcc

SEQ ID NO: 46362 - DNA, 20 bp, Human immunodeficiency virus 2
tctccagcactagcaggtag

SEQ ID NO: 46363 - DNA, 20 bp, Human immunodeficiency virus 2
cctgctggactctcaccagt

SEQ ID NO: 46364 - DNA, 20 bp, Human immunodeficiency virus 2
gccggtactgggcagacggc

SEQ ID NO: 46365 - DNA, 20 bp, Human immunodeficiency virus 2
cttgcttaaagacctcttca

SEQ ID NO: 46366 - DNA, 20 bp, Human immunodeficiency virus 2
cttaaagacctcttcaataa

SEQ ID NO: 46367 - DNA, 20 bp, Influenza B virus
aaactgccactcaaggggaa

SEQ ID NO: 46368 - DNA, 20 bp, Influenza B virus
acttccccttgagtggcagt

SEQ ID NO: 46369 - DNA, 20 bp, Influenza B virus
cccttgagtggcagttttaa

SEQ ID NO: 46370 - DNA, 20 bp, Influenza B virus
agtggcagttttaaccacat

SEQ ID NO: 46371 - DNA, 20 bp, Influenza B virus
taaccacatgaggtgagttt

SEQ ID NO: 46372 - DNA, 20 bp, Influenza B virus
cctataatgcacgacagaac

SEQ ID NO: 46373 - DNA, 20 bp, Influenza B virus
ctataatgcacgacagaaca

SEQ ID NO: 46374 - DNA, 20 bp, Influenza B virus
ttgttctgtcgtgcattata

SEQ ID NO: 46375 - DNA, 20 bp, Influenza B virus
tgttctgtcgtgcattatag

SEQ ID NO: 46376 - DNA, 20 bp, Influenza B virus
gttctgtcgtgcattatagg

SEQ ID NO: 46377 - DNA, 20 bp, Influenza B virus
aacacaatggcttgggttat

SEQ ID NO: 46378 - DNA, 20 bp, Influenza B virus
ggttatcccaaaagacaaca

SEQ ID NO: 46379 - DNA, 20 bp, Influenza B virus
tcccaaaagacaacaacaag

SEQ ID NO: 46380 - DNA, 20 bp, Influenza B virus
gttcagaaggggaagaccaa

SEQ ID NO: 46381 - DNA, 20 bp, Influenza B virus
ttcagaaggggaagaccaaa

SEQ ID NO: 46382 - DNA, 20 bp, Influenza B virus
ttgttgattacatggtacaa

SEQ ID NO: 46383 - DNA, 20 bp, Influenza B virus
ttgattacatggtacaaaaa

SEQ ID NO: 46384 - DNA, 20 bp, Influenza B virus
attacatggtacaaaaacct

SEQ ID NO: 46385 - DNA, 20 bp, Influenza B virus
catggtacaaaaacctggaa

SEQ ID NO: 46386 - DNA, 20 bp, Influenza B virus
tttatcaaagaggcatttta

SEQ ID NO: 46387 - DNA, 20 bp, Influenza B virus
aagctggccaatggaaccaa

SEQ ID NO: 46388 - DNA, 20 bp, Influenza B virus
aaggaaagaggtttcttcgg

SEQ ID NO: 46389 - DNA, 20 bp, Influenza B virus
cttcggagctattgctggtt

SEQ ID NO: 46390 - DNA, 20 bp, Influenza B virus
ttcggagctattgctggttt

SEQ ID NO: 46391 - DNA, 20 bp, Influenza B virus
ggagctattgctggtttctt

SEQ ID NO: 46392 - DNA, 20 bp, Influenza B virus
acgacgaaatactcgagcta

SEQ ID NO: 46393 - DNA, 20 bp, Influenza B virus
cagtcttgctttccaacgaa

SEQ ID NO: 46394 - DNA, 20 bp, Influenza B virus
gttggaaagcaagactgcaa

SEQ ID NO: 46395 - DNA, 20 bp, Influenza B virus
gaaagcaagactgcaagctc

SEQ ID NO: 46396 - DNA, 20 bp, Influenza B virus
gtgagcttattgtatcagct

SEQ ID NO: 46397 - DNA, 20 bp, Influenza B virus
cctagacaggatagctgctg

SEQ ID NO: 46398 - DNA, 20 bp, Influenza B virus
aatgcaggagatttttctct

SEQ ID NO: 46399 - DNA, 20 bp, Influenza B virus
atgcaggagatttttctctt

SEQ ID NO: 46400 - DNA, 20 bp, Influenza B virus
ttctcttcccacttttgatt

SEQ ID NO: 46401 - DNA, 20 bp, Influenza B virus
tctcttcccacttttgattc

SEQ ID NO: 46402 - DNA, 20 bp, Influenza A virus
agctatacaagaagctgaaa

SEQ ID NO: 46403 - DNA, 20 bp, Influenza A virus
catggggctaaggaggtcgc

SEQ ID NO: 46404 - DNA, 20 bp, Influenza A virus
agtagctgagtgcgacctcc

SEQ ID NO: 46405 - DNA, 20 bp, Influenza A virus
gccccatggaatgttatttc

SEQ ID NO: 46406 - DNA, 20 bp, Influenza A virus
tttctcttttcagcttcttg

SEQ ID NO: 46407 - DNA, 20 bp, Influenza A virus
ctagtcaggctaggcagatg

SEQ ID NO: 46408 - DNA, 20 bp, Influenza A virus
cgctgcctgctcactcgatc

SEQ ID NO: 46409 - DNA, 20 bp, Influenza A virus
ttgttgccgcaagtatcatt

SEQ ID NO: 46410 - DNA, 20 bp, Influenza A virus
ttgccgcaagtatcattggg

SEQ ID NO: 46411 - DNA, 20 bp, Influenza A virus
ccgcaagtatcattgggata

SEQ ID NO: 46412 - DNA, 20 bp, Influenza A virus
ggatactgcacttgatattg

SEQ ID NO: 46413 - DNA, 20 bp, Influenza A virus
atattgtggattcttgatcg

SEQ ID NO: 46414 - DNA, 20 bp, Human papillomavirus type 161
cagcctcgttaccagctatc

SEQ ID NO: 46415 - DNA, 20 bp, Human papillomavirus type 161
ccagctatcagcctttttga

SEQ ID NO: 46416 - DNA, 20 bp, Human papillomavirus type 161
ttgaagaattattgcgcgga

SEQ ID NO: 46417 - DNA, 20 bp, Human papillomavirus type 161
tgaagaattattgcgcggag

SEQ ID NO: 46418 - DNA, 20 bp, Human papillomavirus type 161
gaagaattattgcgcggagg

SEQ ID NO: 46419 - DNA, 20 bp, Human papillomavirus type 161
cctggcattgtataacaagc

SEQ ID NO: 46420 - DNA, 20 bp, Human papillomavirus type 161
tataacaagcaagtaactga

SEQ ID NO: 46421 - DNA, 20 bp, Human papillomavirus type 161
agccttacatgtgctaaaac

SEQ ID NO: 46422 - DNA, 20 bp, Human papillomavirus type 161
gccttacatgtgctaaaacg

SEQ ID NO: 46423 - DNA, 20 bp, Human papillomavirus type 161
catgtgctaaaacgaaagta

SEQ ID NO: 46424 - DNA, 20 bp, Human papillomavirus type 161
ttttagaaagtttgcagtgc

SEQ ID NO: 46425 - DNA, 20 bp, Human papillomavirus type 161
tttagaaagtttgcagtgca

SEQ ID NO: 46426 - DNA, 20 bp, Human papillomavirus type 161
ttagaaagtttgcagtgcaa

SEQ ID NO: 46427 - DNA, 20 bp, Human papillomavirus type 161
tagaaagtttgcagtgcaat

SEQ ID NO: 46428 - DNA, 20 bp, Human papillomavirus type 161
agaaagtttgcagtgcaatt

SEQ ID NO: 46429 - DNA, 20 bp, Human papillomavirus type 161
caatggaaccttttatgagg

SEQ ID NO: 46430 - DNA, 20 bp, Human papillomavirus type 161
tatgaggaggttacaggaga

SEQ ID NO: 46431 - DNA, 20 bp, Human papillomavirus type 161
atgaggaggttacaggagaa

SEQ ID NO: 46432 - DNA, 20 bp, Human papillomavirus type 161
tgaggaggttacaggagaaa

SEQ ID NO: 46433 - DNA, 20 bp, Human papillomavirus type 161
caggagaaagagtatacttt

SEQ ID NO: 46434 - DNA, 20 bp, Human papillomavirus type 161
agctgaggatttgtataaac

SEQ ID NO: 46435 - DNA, 20 bp, Human papillomavirus type 161
gtataaacaatgctttactg

SEQ ID NO: 46436 - DNA, 20 bp, Human papillomavirus type 161
tataaacaatgctttactgg

SEQ ID NO: 46437 - DNA, 20 bp, Human papillomavirus type 161
actggtgattgtccccctga

SEQ ID NO: 46438 - DNA, 20 bp, Human papillomavirus type 161
ctggtgattgtccccctgat

SEQ ID NO: 46439 - DNA, 20 bp, Human papillomavirus type 161
gacctgcagtacctgtggag

SEQ ID NO: 46440 - DNA, 20 bp, Human papillomavirus type 161
gtcctgtagaaataatacct

SEQ ID NO: 46441 - DNA, 20 bp, Human papillomavirus type 161
tagatttaacaaatgtacaa

SEQ ID NO: 46442 - DNA, 20 bp, Human papillomavirus type 161
aacaaatgtacaaattcctg

SEQ ID NO: 46443 - DNA, 20 bp, Human papillomavirus type 161
gtacatttgttaaatctata

SEQ ID NO: 46444 - DNA, 20 bp, Human papillomavirus type 161
agccaataccaccccctaaa

SEQ ID NO: 46445 - DNA, 20 bp, Human papillomavirus type 161
tgctttagatgtaaataatg

SEQ ID NO: 46446 - DNA, 20 bp, Human papillomavirus type 161
gctttagatgtaaataatga

SEQ ID NO: 46447 - DNA, 20 bp, Human papillomavirus type 161
ctttagatgtaaataatgaa

SEQ ID NO: 46448 - DNA, 20 bp, Human papillomavirus type 161
agatgtaaataatgaaccac

SEQ ID NO: 46449 - DNA, 20 bp, Human papillomavirus type 161
aacgtttagctggcaatgcc

SEQ ID NO: 46450 - DNA, 20 bp, Human papillomavirus type 161
agctggcaatgccaggagat

SEQ ID NO: 46451 - DNA, 20 bp, Human papillomavirus type 161
gctggcaatgccaggagatt

SEQ ID NO: 46452 - DNA, 20 bp, Human papillomavirus type 161
tacaatagactgtttgaaca

SEQ ID NO: 46453 - DNA, 20 bp, Human papillomavirus type 161
gaacaggttcctacacgaaa

SEQ ID NO: 46454 - DNA, 20 bp, Human papillomavirus type 161
cataagagtgagccgtgaag

SEQ ID NO: 46455 - DNA, 20 bp, Human papillomavirus type 161
ataagagtgagccgtgaagg

SEQ ID NO: 46456 - DNA, 20 bp, Human papillomavirus type 161
cagttgggtcgccctgttca

SEQ ID NO: 46457 - DNA, 20 bp, Human papillomavirus type 161
ggtcgccctgttcattttta

SEQ ID NO: 46458 - DNA, 20 bp, Human papillomavirus type 161
tggtagttatagatgcacga

SEQ ID NO: 46459 - DNA, 20 bp, Human papillomavirus type 161
acgtaaacgaaaacgcaaac

SEQ ID NO: 46460 - DNA, 20 bp, Human papillomavirus type 161
cgtaaacgaaaacgcaaacg

SEQ ID NO: 46461 - DNA, 20 bp, Human papillomavirus type 161
taattattttgcagatgact

SEQ ID NO: 46462 - DNA, 20 bp, Human papillomavirus type 161
aattattttgcagatgactg

SEQ ID NO: 46463 - DNA, 20 bp, Human papillomavirus type 161
attattttgcagatgactgt

SEQ ID NO: 46464 - DNA, 20 bp, Human papillomavirus type 161
cagcacatcaatttagagtg

SEQ ID NO: 46465 - DNA, 20 bp, Human papillomavirus type 161
agcacatcaatttagagtgt

SEQ ID NO: 46466 - DNA, 20 bp, Human papillomavirus type 161
agagtgtttagattactgtg

SEQ ID NO: 46467 - DNA, 20 bp, Human papillomavirus type 161
gagtgtttagattactgtgt

SEQ ID NO: 46468 - DNA, 20 bp, Human papillomavirus type 161
agattactgtgtccagatcc

SEQ ID NO: 46469 - DNA, 20 bp, Human papillomavirus type 161
catttgatcctaagcaaaat

SEQ ID NO: 46470 - DNA, 20 bp, Human papillomavirus type 161
gatcctaagcaaaatcaggt

SEQ ID NO: 46471 - DNA, 20 bp, Human papillomavirus type 161
atcctaagcaaaatcaggtg

SEQ ID NO: 46472 - DNA, 20 bp, Human papillomavirus type 161
atagtaggttgcactcctcc

SEQ ID NO: 46473 - DNA, 20 bp, Human papillomavirus type 161
tagtaggttgcactcctcca

SEQ ID NO: 46474 - DNA, 20 bp, Human papillomavirus type 161
gacattttaaatgatatcac

SEQ ID NO: 46475 - DNA, 20 bp, Human papillomavirus type 161
taaatgatatcaccaaatgg

SEQ ID NO: 46476 - DNA, 20 bp, Human papillomavirus type 161
aaatgatatcaccaaatggc

SEQ ID NO: 46477 - DNA, 20 bp, Human papillomavirus type 161
aatgatatcaccaaatggcc

SEQ ID NO: 46478 - DNA, 20 bp, Human papillomavirus type 161
tattaaaatgtcaaaggata

SEQ ID NO: 46479 - DNA, 20 bp, Human papillomavirus type 161
cacacatcaatgttatgaat

SEQ ID NO: 46480 - DNA, 20 bp, Human papillomavirus type 161
tgaatccaacagtgttagat

SEQ ID NO: 46481 - DNA, 20 bp, Human papillomavirus type 161
gatgattgggatttagcatt

SEQ ID NO: 46482 - DNA, 20 bp, Human papillomavirus type 161
ggatttagcatttgtacccc

SEQ ID NO: 46483 - DNA, 20 bp, Human papillomavirus type 161
agcatttgtacccccaccac

SEQ ID NO: 46484 - DNA, 20 bp, Human papillomavirus type 161
taggtagaaaacgtatcaga

SEQ ID NO: 46485 - DNA, 20 bp, Human papillomavirus type 161
aggtagaaaacgtatcagaa

SEQ ID NO: 46486 - DNA, 20 bp, Human papillomavirus type 161
ggtagaaaacgtatcagaac

SEQ ID NO: 46487 - DNA, 20 bp, Human papillomavirus type 161
catctccgaaagtatccaga

SEQ ID NO: 46488 - DNA, 20 bp, Human papillomavirus type 161
cagtatttatgtatggaaca

SEQ ID NO: 46489 - DNA, 20 bp, Human papillomavirus type 154
ggaaggaaaatgtttgccat

SEQ ID NO: 46490 - DNA, 20 bp, Human papillomavirus type 154
gaaggaaaatgtttgccatg

SEQ ID NO: 46491 - DNA, 20 bp, Human papillomavirus type 154
gccatgcctgttgcgaaagc

SEQ ID NO: 46492 - DNA, 20 bp, Human papillomavirus type 154
ccatgcctgttgcgaaagct

SEQ ID NO: 46493 - DNA, 20 bp, Human papillomavirus type 154
cgaaagctgtttgtctttaa

SEQ ID NO: 46494 - DNA, 20 bp, Human papillomavirus type 154
tcaccttaccaggttgacac

SEQ ID NO: 46495 - DNA, 20 bp, Human papillomavirus type 154
ccaggttgacactatttgta

SEQ ID NO: 46496 - DNA, 20 bp, Human papillomavirus type 154
acactatttgtaattcctgt

SEQ ID NO: 46497 - DNA, 20 bp, Human papillomavirus type 154
gtaattcctgtaacaaacgc

SEQ ID NO: 46498 - DNA, 20 bp, Human papillomavirus type 154
taattcctgtaacaaacgca

SEQ ID NO: 46499 - DNA, 20 bp, Human papillomavirus type 154
caggacagtggactaggaga

SEQ ID NO: 46500 - DNA, 20 bp, Human papillomavirus type 154
aggacagtggactaggagac

SEQ ID NO: 46501 - DNA, 20 bp, Human papillomavirus type 154
ttttaaccaggtagagactt

SEQ ID NO: 46502 - DNA, 20 bp, Human papillomavirus type 154
taaccaggtagagactttat

SEQ ID NO: 46503 - DNA, 20 bp, Human papillomavirus type 154
aaccaggtagagactttatc

SEQ ID NO: 46504 - DNA, 20 bp, Human papillomavirus type 154
cctgattggattgctaaact

SEQ ID NO: 46505 - DNA, 20 bp, Human papillomavirus type 154
gattgctaaactaacacaat

SEQ ID NO: 46506 - DNA, 20 bp, Human papillomavirus type 154
ctaaactaacacaattaaat

SEQ ID NO: 46507 - DNA, 20 bp, Human papillomavirus type 154
aatcatcaaatggcttctca

SEQ ID NO: 46508 - DNA, 20 bp, Human papillomavirus type 154
tcaagcggaatcatttgatt

SEQ ID NO: 46509 - DNA, 20 bp, Human papillomavirus type 154
agatgcactacaagagcaat

SEQ ID NO: 46510 - DNA, 20 bp, Human papillomavirus type 154
gatgcactacaagagcaatt

SEQ ID NO: 46511 - DNA, 20 bp, Human papillomavirus type 154
atgactctctatgaattggg

SEQ ID NO: 46512 - DNA, 20 bp, Human papillomavirus type 154
ggacccaccgatttatcctc

SEQ ID NO: 46513 - DNA, 20 bp, Human papillomavirus type 154
atcctctcaaataaagcatt

SEQ ID NO: 46514 - DNA, 20 bp, Human papillomavirus type 154
acaaccgcagacgacaagcc

SEQ ID NO: 46515 - DNA, 20 bp, Human papillomavirus type 154
caaccgcagacgacaagccc

SEQ ID NO: 46516 - DNA, 20 bp, Human papillomavirus type 154
ttgatggtgagtacgtggta

SEQ ID NO: 46517 - DNA, 20 bp, Human papillomavirus type 154
atggtgagtacgtggtagtg

SEQ ID NO: 46518 - DNA, 20 bp, Human papillomavirus type 154
tcgtctgcggttgtaaagat

SEQ ID NO: 46519 - DNA, 20 bp, Human papillomavirus type 154
tgtgcaagacatttacagat

SEQ ID NO: 46520 - DNA, 20 bp, Human papillomavirus type 154
acagatcttgtgtgcaaggg

SEQ ID NO: 46521 - DNA, 20 bp, Human papillomavirus type 154
cagatcttgtgtgcaagggg

SEQ ID NO: 46522 - DNA, 20 bp, Human papillomavirus type 154
tgtgcaagggggggactgtc

SEQ ID NO: 46523 - DNA, 20 bp, Human papillomavirus type 154
aaggaacaacatgggcagat

SEQ ID NO: 46524 - DNA, 20 bp, Human papillomavirus type 154
ttggtcctcaagaagtacta

SEQ ID NO: 46525 - DNA, 20 bp, Human papillomavirus type 154
gtcctcaagaagtactacca

SEQ ID NO: 46526 - DNA, 20 bp, Human papillomavirus type 154
tagttcctttagaagaagga

SEQ ID NO: 46527 - DNA, 20 bp, Human papillomavirus type 154
ctttagaagaaggaattcca

SEQ ID NO: 46528 - DNA, 20 bp, Human papillomavirus type 154
agaagaaggaattccagatg

SEQ ID NO: 46529 - DNA, 20 bp, Human papillomavirus type 154
atctaatcgtgccatctcaa

SEQ ID NO: 46530 - DNA, 20 bp, Human papillomavirus type 154
tctaatcgtgccatctcaag

SEQ ID NO: 46531 - DNA, 20 bp, Human papillomavirus type 154
atcatagatttgttcaacag

SEQ ID NO: 46532 - DNA, 20 bp, Human papillomavirus type 154
tcatagatttgttcaacagg

SEQ ID NO: 46533 - DNA, 20 bp, Human papillomavirus type 154
gttcaacaggttcctactcg

SEQ ID NO: 46534 - DNA, 20 bp, Human papillomavirus type 154
tacaattaacacatttgtta

SEQ ID NO: 46535 - DNA, 20 bp, Human papillomavirus type 154
acaattaacacatttgttaa

SEQ ID NO: 46536 - DNA, 20 bp, Human papillomavirus type 154
caattaacacatttgttaac

SEQ ID NO: 46537 - DNA, 20 bp, Human papillomavirus type 154
acacatttgttaacattcct

SEQ ID NO: 46538 - DNA, 20 bp, Human papillomavirus type 154
gttaacattcctgacactag

SEQ ID NO: 46539 - DNA, 20 bp, Human papillomavirus type 154
cagcaaatcaatatagagtt

SEQ ID NO: 46540 - DNA, 20 bp, Human papillomavirus type 154
agcaaatcaatatagagtta

SEQ ID NO: 46541 - DNA, 20 bp, Human papillomavirus type 154
tgagattattattaccagat

SEQ ID NO: 46542 - DNA, 20 bp, Human papillomavirus type 154
ttattaccagatcctaacca

SEQ ID NO: 46543 - DNA, 20 bp, Human papillomavirus type 154
ttaccagatcctaaccagtt

SEQ ID NO: 46544 - DNA, 20 bp, Human papillomavirus type 154
tattcaaatgactaaagagg

SEQ ID NO: 46545 - DNA, 20 bp, Human papillomavirus type 154
attcaaatgactaaagaggt

SEQ ID NO: 46546 - DNA, 20 bp, Human papillomavirus type 154
ttcaaatgactaaagaggtg

SEQ ID NO: 46547 - DNA, 20 bp, Human papillomavirus type 154
aaatgactaaagaggtgtat

SEQ ID NO: 46548 - DNA, 20 bp, Human papillomavirus type 154
tttttttatggacggcggga

SEQ ID NO: 46549 - DNA, 20 bp, Human papillomavirus type 154
gctcatattaatgcaatgga

SEQ ID NO: 46550 - DNA, 20 bp, Human papillomavirus type 154
atgcaatggacccttcaata

SEQ ID NO: 46551 - DNA, 20 bp, Human papillomavirus type 154
aatattagaaaactggcagc

SEQ ID NO: 46552 - DNA, 20 bp, Human papillomavirus type 154
gaaaactggcagctggcatt

SEQ ID NO: 46553 - DNA, 20 bp, Human papillomavirus type 154
attccagctcctcctcaagg

SEQ ID NO: 46554 - DNA, 20 bp, Human papillomavirus type 154
ctcgagaggtcatatctgct

SEQ ID NO: 46555 - DNA, 20 bp, Human papillomavirus type 154
gatacccgaccgatttcggt

SEQ ID NO: 46556 - DNA, 20 bp, Human papillomavirus type 154
atacccgaccgatttcggta

SEQ ID NO: 46557 - DNA, 20 bp, Human papillomavirus type 154
cggtaagtacaatacttata

SEQ ID NO: 46558 - DNA, 20 bp, Human papillomavirus type 154
ggtaagtacaatacttatat

SEQ ID NO: 46559 - DNA, 20 bp, Influenza A virus
agaagtacacatcaggaaga

SEQ ID NO: 46560 - DNA, 20 bp, Influenza A virus
gaatgaaatggatgatggcg

SEQ ID NO: 46561 - DNA, 20 bp, Influenza A virus
catcgccatcatccatttca

SEQ ID NO: 46562 - DNA, 20 bp, Influenza A virus
atcgccatcatccatttcat

SEQ ID NO: 46563 - DNA, 20 bp, Influenza A virus
cattctaagagcgggattct

SEQ ID NO: 46564 - DNA, 20 bp, Influenza A virus
tccaaaggtgtataaaacct

SEQ ID NO: 46565 - DNA, 20 bp, Influenza A virus
tcaaagtaggttttatacac

SEQ ID NO: 46566 - DNA, 20 bp, Influenza A virus
caaagtaggttttatacacc

SEQ ID NO: 46567 - DNA, 20 bp, Influenza A virus
aaagtaggttttatacacct

SEQ ID NO: 46568 - DNA, 20 bp, Influenza A virus
tatacacctttggataatgg

SEQ ID NO: 46569 - DNA, 20 bp, Influenza A virus
gagccaggatattgacatca

SEQ ID NO: 46570 - DNA, 20 bp, Influenza A virus
acatcagaatcacagctgac

SEQ ID NO: 46571 - DNA, 20 bp, Influenza A virus
taatattgctcctttaatgg

SEQ ID NO: 46572 - DNA, 20 bp, Influenza A virus
ctcctttaatggtggcatat

SEQ ID NO: 46573 - DNA, 20 bp, Influenza A virus
aatggtggcatatatgttgg

SEQ ID NO: 46574 - DNA, 20 bp, Influenza A virus
accaaagtttaatcattgct

SEQ ID NO: 46575 - DNA, 20 bp, Influenza A virus
aatcattgctgctaggaaca

SEQ ID NO: 46576 - DNA, 20 bp, Influenza A virus
atcattgctgctaggaacat

SEQ ID NO: 46577 - DNA, 20 bp, Influenza A virus
ctgctaggaacattgtcagg

SEQ ID NO: 46578 - DNA, 20 bp, Influenza A virus
tcaggagagcaacagtatca

SEQ ID NO: 46579 - DNA, 20 bp, Influenza A virus
caggcaacctccaaacattg

SEQ ID NO: 46580 - DNA, 20 bp, Influenza A virus
aagataaaagtacatgaagg

SEQ ID NO: 46581 - DNA, 20 bp, Influenza A virus
acaatggttggacgaagagc

SEQ ID NO: 46582 - DNA, 20 bp, Influenza A virus
gacgaagagcaacagccatt

SEQ ID NO: 46583 - DNA, 20 bp, Influenza A virus
taagaaaagcaaccagaagg

SEQ ID NO: 46584 - DNA, 20 bp, Influenza A virus
gtaaacagagcaaatcaacg

SEQ ID NO: 46585 - DNA, 20 bp, Influenza A virus
caaaaggatgcaaaggtgct

SEQ ID NO: 46586 - DNA, 20 bp, Influenza A virus
aaaaggatgcaaaggtgctg

SEQ ID NO: 46587 - DNA, 20 bp, Influenza A virus
cccagttttgaaacagcacc

SEQ ID NO: 46588 - DNA, 20 bp, Influenza A virus
tgaaacagcacctttgcatc

SEQ ID NO: 46589 - DNA, 20 bp, Influenza A virus
gtgaaacacagggaatggaa

SEQ ID NO: 46590 - DNA, 20 bp, Influenza A virus
acgataacttattcatcgtc

SEQ ID NO: 46591 - DNA, 20 bp, Influenza A virus
ttcatcgtctatgatgtggg

SEQ ID NO: 46592 - DNA, 20 bp, Influenza A virus
tcgtcaacttttccattccc

SEQ ID NO: 46593 - DNA, 20 bp, Influenza A virus
tccattccctgtgtttcact

SEQ ID NO: 46594 - DNA, 20 bp, Influenza A virus
gtgagaacgctattccagca

SEQ ID NO: 46595 - DNA, 20 bp, Influenza A virus
tgagaacgctattccagcag

SEQ ID NO: 46596 - DNA, 20 bp, Influenza A virus
cagcagatgcgtgatgtttt

SEQ ID NO: 46597 - DNA, 20 bp, Influenza A virus
tgggaacgttcgacactgtt

SEQ ID NO: 46598 - DNA, 20 bp, Influenza A virus
gggaacgttcgacactgttc

SEQ ID NO: 46599 - DNA, 20 bp, Influenza A virus
cagaggacccagatgaagga

SEQ ID NO: 46600 - DNA, 20 bp, Influenza A virus
agaggatttctaatcctcgg

SEQ ID NO: 46601 - DNA, 20 bp, Influenza A virus
ctaatcctcggcaaagaaga

SEQ ID NO: 46602 - DNA, 20 bp, Influenza A virus
taatcctcggcaaagaagac

SEQ ID NO: 46603 - DNA, 20 bp, Influenza A virus
tgtcttctttgccgaggatt

SEQ ID NO: 46604 - DNA, 20 bp, Influenza A virus
actgaaagaggagtggaagt

SEQ ID NO: 46605 - DNA, 20 bp, Influenza A virus
cagttgcattgacgacttcc

SEQ ID NO: 46606 - DNA, 20 bp, Influenza A virus
agttgcattgacgacttcca

SEQ ID NO: 46607 - DNA, 20 bp, Influenza A virus
cattgacgacttccactcct

SEQ ID NO: 46608 - DNA, 20 bp, Influenza A virus
acgacttccactcctctttc

SEQ ID NO: 46609 - DNA, 20 bp, Influenza A virus
tcctgggaaattcgtgaatg

SEQ ID NO: 46610 - DNA, 20 bp, Influenza A virus
gtgaatgaagaagctctgag

SEQ ID NO: 46611 - DNA, 20 bp, Influenza A virus
tcagagaatcaggcggaatt

SEQ ID NO: 46612 - DNA, 20 bp, Influenza A virus
acaaggaagcaatgggattc

SEQ ID NO: 46613 - DNA, 20 bp, Influenza A virus
cttccttgtcaattccgcct

SEQ ID NO: 46614 - DNA, 20 bp, Influenza A virus
ggagttctaattatcaacaa

SEQ ID NO: 46615 - DNA, 20 bp, Influenza A virus
taattatcaacaatcttttg

SEQ ID NO: 46616 - DNA, 20 bp, Influenza A virus
tcaacaatcttttgtaccga

SEQ ID NO: 46617 - DNA, 20 bp, Influenza A virus
tgtaccgagtccaggagcga

SEQ ID NO: 46618 - DNA, 20 bp, Influenza A virus
gtaccgagtccaggagcgag

SEQ ID NO: 46619 - DNA, 20 bp, Influenza A virus
atgccaattgtgaaggggac

SEQ ID NO: 46620 - DNA, 20 bp, Influenza A virus
tgaaggggactgctatcata

SEQ ID NO: 46621 - DNA, 20 bp, Influenza A virus
ccatttcagaacatagatag

SEQ ID NO: 46622 - DNA, 20 bp, Influenza A virus
cagaacatagatagcagggc

SEQ ID NO: 46623 - DNA, 20 bp, Influenza A virus
agaacatagatagcagggca

SEQ ID NO: 46624 - DNA, 20 bp, Influenza A virus
cattgaaaatggatgggaag

SEQ ID NO: 46625 - DNA, 20 bp, Influenza A virus
attgaaaatggatgggaagg

SEQ ID NO: 46626 - DNA, 20 bp, Influenza A virus
aaaatggatgggaaggccta

SEQ ID NO: 46627 - DNA, 20 bp, Influenza A virus
atggttggtatggtttcaga

SEQ ID NO: 46628 - DNA, 20 bp, Influenza A virus
gtatggtttcagacaccaga

SEQ ID NO: 46629 - DNA, 20 bp, Influenza A virus
atctggctgattcagaaatg

SEQ ID NO: 46630 - DNA, 20 bp, Influenza A virus
agaaatggacaaactgtacg

SEQ ID NO: 46631 - DNA, 20 bp, Influenza A virus
ttcagcattctctctcagct

SEQ ID NO: 46632 - DNA, 20 bp, Influenza A virus
agcattctctctcagctgtc

SEQ ID NO: 46633 - DNA, 20 bp, Influenza A virus
tctctcagctgtcttttcac

SEQ ID NO: 46634 - DNA, 20 bp, Human papillomavirus type 32
ttaaggcagaatggcaagta

SEQ ID NO: 46635 - DNA, 20 bp, Human papillomavirus type 32
aggcagaatggcaagtactt

SEQ ID NO: 46636 - DNA, 20 bp, Human papillomavirus type 32
tgcctcatcacagccaagta

SEQ ID NO: 46637 - DNA, 20 bp, Human papillomavirus type 32
taccaattgtgcaaagattt

SEQ ID NO: 46638 - DNA, 20 bp, Human papillomavirus type 32
tgcaaagattttgggctgac

SEQ ID NO: 46639 - DNA, 20 bp, Human papillomavirus type 32
gaagaacaaataattcgctg

SEQ ID NO: 46640 - DNA, 20 bp, Human papillomavirus type 32
gctgtgctatatgtcaaaag

SEQ ID NO: 46641 - DNA, 20 bp, Human papillomavirus type 32
atcgccaagtgagaaagatc

SEQ ID NO: 46642 - DNA, 20 bp, Human papillomavirus type 32
tcgccaagtgagaaagatca

SEQ ID NO: 46643 - DNA, 20 bp, Human papillomavirus type 32
taaatatgatgatctttctc

SEQ ID NO: 46644 - DNA, 20 bp, Human papillomavirus type 32
cagaatagtgtgtggttgta

SEQ ID NO: 46645 - DNA, 20 bp, Human papillomavirus type 32
tacacagtgtggacggtcag

SEQ ID NO: 46646 - DNA, 20 bp, Human papillomavirus type 32
aacttgttgtcagtagtaca

SEQ ID NO: 46647 - DNA, 20 bp, Human papillomavirus type 32
ttgtcagtagtacaggcgcg

SEQ ID NO: 46648 - DNA, 20 bp, Human papillomavirus type 32
tcagtagtacaggcgcggac

SEQ ID NO: 46649 - DNA, 20 bp, Human papillomavirus type 32
cttaagtgtaagaacttgca

SEQ ID NO: 46650 - DNA, 20 bp, Human papillomavirus type 32
agtgtaagaacttgcaagca

SEQ ID NO: 46651 - DNA, 20 bp, Human papillomavirus type 32
caagcaacattgttaggtaa

SEQ ID NO: 46652 - DNA, 20 bp, Human papillomavirus type 32
ttaggtaagtttaaagagct

SEQ ID NO: 46653 - DNA, 20 bp, Human papillomavirus type 32
aaacttacctaacaatgttg

SEQ ID NO: 46654 - DNA, 20 bp, Human papillomavirus type 32
ttaatgctaattagatttaa

SEQ ID NO: 46655 - DNA, 20 bp, Human papillomavirus type 32
atgctaattagatttaaatg

SEQ ID NO: 46656 - DNA, 20 bp, Human papillomavirus type 32
gatttaaatgtggcaagaat

SEQ ID NO: 46657 - DNA, 20 bp, Human papillomavirus type 32
aaatgtggcaagaatcgcac

SEQ ID NO: 46658 - DNA, 20 bp, Human papillomavirus type 32
aatgtggcaagaatcgcacc

SEQ ID NO: 46659 - DNA, 20 bp, Human papillomavirus type 32
catatgaatatgcccaacgt

SEQ ID NO: 46660 - DNA, 20 bp, Human papillomavirus type 32
ttaaaaagcaactgtcaggc

SEQ ID NO: 46661 - DNA, 20 bp, Human papillomavirus type 32
taaaaagcaactgtcaggca

SEQ ID NO: 46662 - DNA, 20 bp, Human papillomavirus type 32
aaaaagcaactgtcaggcaa

SEQ ID NO: 46663 - DNA, 20 bp, Human papillomavirus type 32
aaaagcaactgtcaggcaaa

SEQ ID NO: 46664 - DNA, 20 bp, Human papillomavirus type 32
agatgcgtgccaggaacagt

SEQ ID NO: 46665 - DNA, 20 bp, Human papillomavirus type 32
gatgcgtgccaggaacagtt

SEQ ID NO: 46666 - DNA, 20 bp, Human papillomavirus type 32
ttagaactgtatgaggaaga

SEQ ID NO: 46667 - DNA, 20 bp, Human papillomavirus type 32
gaactgtatgaggaagatag

SEQ ID NO: 46668 - DNA, 20 bp, Human papillomavirus type 32
agaaaaacatgtgcagcact

SEQ ID NO: 46669 - DNA, 20 bp, Human papillomavirus type 32
tgaaatgtggcatgcggagc

SEQ ID NO: 46670 - DNA, 20 bp, Human papillomavirus type 32
aaaaaaacagggacgcactg

SEQ ID NO: 46671 - DNA, 20 bp, Human papillomavirus type 32
aaaaaacagggacgcactgt

SEQ ID NO: 46672 - DNA, 20 bp, Human papillomavirus type 32
tattcgatggaaatcctgag

SEQ ID NO: 46673 - DNA, 20 bp, Human papillomavirus type 32
gatggaaatcctgagaatgc

SEQ ID NO: 46674 - DNA, 20 bp, Human papillomavirus type 32
tacaaagaccccaccccgac

SEQ ID NO: 46675 - DNA, 20 bp, Human papillomavirus type 32
gcagccaccaacaaagcacc

SEQ ID NO: 46676 - DNA, 20 bp, Human papillomavirus type 32
cagccaccaacaaagcacct

SEQ ID NO: 46677 - DNA, 20 bp, Human papillomavirus type 32
gttggtggctgcaaagactg

SEQ ID NO: 46678 - DNA, 20 bp, Human papillomavirus type 32
ttggtggctgcaaagactgt

SEQ ID NO: 46679 - DNA, 20 bp, Human papillomavirus type 32
ttgtttatagttgttgctgc

SEQ ID NO: 46680 - DNA, 20 bp, Human papillomavirus type 32
tttatagttgttgctgcgtg

SEQ ID NO: 46681 - DNA, 20 bp, Human papillomavirus type 32
atagttgttgctgcgtgtgt

SEQ ID NO: 46682 - DNA, 20 bp, Human papillomavirus type 32
tagttgttgctgcgtgtgtg

SEQ ID NO: 46683 - DNA, 20 bp, Human papillomavirus type 32
ttgctgcgtgtgtgttgtgt

SEQ ID NO: 46684 - DNA, 20 bp, Human papillomavirus type 32
tactttagaaaatggcgatg

SEQ ID NO: 46685 - DNA, 20 bp, Human papillomavirus type 32
agaaaatggcgatgtgtggc

SEQ ID NO: 46686 - DNA, 20 bp, Human papillomavirus type 32
gaaaatggcgatgtgtggct

SEQ ID NO: 46687 - DNA, 20 bp, Human papillomavirus type 32
ttagccacagtgtttatttg

SEQ ID NO: 46688 - DNA, 20 bp, Human papillomavirus type 32
tagccacagtgtttatttgt

SEQ ID NO: 46689 - DNA, 20 bp, Human papillomavirus type 32
aatattacgtcctctgcaag

SEQ ID NO: 46690 - DNA, 20 bp, Human papillomavirus type 32
atattacgtcctctgcaagt

SEQ ID NO: 46691 - DNA, 20 bp, Human papillomavirus type 32
cgtcctctgcaagtggcccg

SEQ ID NO: 46692 - DNA, 20 bp, Human papillomavirus type 32
gacatttctcctcccaccaa

SEQ ID NO: 46693 - DNA, 20 bp, Human papillomavirus type 32
ctcctcccaccaatactata

SEQ ID NO: 46694 - DNA, 20 bp, Human papillomavirus type 32
tttccatgatattagcccaa

SEQ ID NO: 46695 - DNA, 20 bp, Human papillomavirus type 32
ttccatgatattagcccaat

SEQ ID NO: 46696 - DNA, 20 bp, Human papillomavirus type 32
tccatgatattagcccaatc

SEQ ID NO: 46697 - DNA, 20 bp, Human papillomavirus type 32
ccatgatattagcccaatca

SEQ ID NO: 46698 - DNA, 20 bp, Human papillomavirus type 32
catgatattagcccaatcac

SEQ ID NO: 46699 - DNA, 20 bp, Human papillomavirus type 32
atctgcctcctcctcctgtt

SEQ ID NO: 46700 - DNA, 20 bp, Human papillomavirus type 32
tctgcctcctcctcctgttt

SEQ ID NO: 46701 - DNA, 20 bp, Human papillomavirus type 32
ccaaggtggtcagcacagat

SEQ ID NO: 46702 - DNA, 20 bp, Human papillomavirus type 32
caaggtggtcagcacagatg

SEQ ID NO: 46703 - DNA, 20 bp, Human papillomavirus type 32
gtacgttgcacatattcatc

SEQ ID NO: 46704 - DNA, 20 bp, Human papillomavirus type 32
ggaattacaaaacagtgtta

SEQ ID NO: 46705 - DNA, 20 bp, Human papillomavirus type 32
gaattacaaaacagtgttat

SEQ ID NO: 46706 - DNA, 20 bp, Human papillomavirus type 32
caaaacagtgttattcagga

SEQ ID NO: 46707 - DNA, 20 bp, Human papillomavirus type 32
ttcaggatggtgatatggca

SEQ ID NO: 46708 - DNA, 20 bp, Human papillomavirus type 32
aggatggtgatatggcagat

SEQ ID NO: 46709 - DNA, 20 bp, Human papillomavirus type 32
tgtcatatatccacaccatg

SEQ ID NO: 46710 - DNA, 20 bp, Human papillomavirus type 32
gaatgttggtgtagctccac

SEQ ID NO: 46711 - DNA, 20 bp, Human papillomavirus type 32
gtgtagctccaccgccctct

SEQ ID NO: 46712 - DNA, 20 bp, Human papillomavirus type 32
agaagatagttatagatttg

SEQ ID NO: 46713 - DNA, 20 bp, Human papillomavirus type 32
gaagatagttatagatttgt

SEQ ID NO: 46714 - DNA, 20 bp, Human papillomavirus type 32
ccgttggataatgtccatta

SEQ ID NO: 46715 - DNA, 20 bp, Human papillomavirus type 32
gataatgtccattaaattta

SEQ ID NO: 46716 - DNA, 20 bp, Human papillomavirus type 32
aatttagcaagcacatgcag

SEQ ID NO: 46717 - DNA, 20 bp, Human papillomavirus type 32
agcaagcacatgcagttttt

SEQ ID NO: 46718 - DNA, 20 bp, Human papillomavirus type 32
gcaagcacatgcagttttta

SEQ ID NO: 46719 - DNA, 20 bp, Human papillomavirus type 136
atcatcaaatggcggcacag

SEQ ID NO: 46720 - DNA, 20 bp, Human papillomavirus type 136
caattaagtaaaatggttca

SEQ ID NO: 46721 - DNA, 20 bp, Human papillomavirus type 136
aattaagtaaaatggttcaa

SEQ ID NO: 46722 - DNA, 20 bp, Human papillomavirus type 136
agtaaaatggttcaatgggc

SEQ ID NO: 46723 - DNA, 20 bp, Human papillomavirus type 136
aatgggcgtatgataacaaa

SEQ ID NO: 46724 - DNA, 20 bp, Human papillomavirus type 136
tactttcggcaagaaatgaa

SEQ ID NO: 46725 - DNA, 20 bp, Human papillomavirus type 136
cggcaagaaatgaaaaatat

SEQ ID NO: 46726 - DNA, 20 bp, Human papillomavirus type 136
ggcaagaaatgaaaaatatg

SEQ ID NO: 46727 - DNA, 20 bp, Human papillomavirus type 136
tcaaatgttgtagggaatgt

SEQ ID NO: 46728 - DNA, 20 bp, Human papillomavirus type 136
caaatgttgtagggaatgtg

SEQ ID NO: 46729 - DNA, 20 bp, Human papillomavirus type 136
aacacccagactgaagagac

SEQ ID NO: 46730 - DNA, 20 bp, Human papillomavirus type 136
ctcaagaagcggcaggacct

SEQ ID NO: 46731 - DNA, 20 bp, Human papillomavirus type 136
aaccacgacatcacctaaaa

SEQ ID NO: 46732 - DNA, 20 bp, Human papillomavirus type 136
taggtgatgtcgtggttgaa

SEQ ID NO: 46733 - DNA, 20 bp, Human papillomavirus type 136
aggtgatgtcgtggttgaac

SEQ ID NO: 46734 - DNA, 20 bp, Human papillomavirus type 136
ggcaaagccatcgatcagta

SEQ ID NO: 46735 - DNA, 20 bp, Human papillomavirus type 136
caagagttgagcgacttaaa

SEQ ID NO: 46736 - DNA, 20 bp, Human papillomavirus type 136
agcgacttaaagcagaggct

SEQ ID NO: 46737 - DNA, 20 bp, Human papillomavirus type 136
aagcagaggctcgggatccg

SEQ ID NO: 46738 - DNA, 20 bp, Human papillomavirus type 136
gtccttataaaaggttgtgc

SEQ ID NO: 46739 - DNA, 20 bp, Human papillomavirus type 136
accccattgaagttacaact

SEQ ID NO: 46740 - DNA, 20 bp, Human papillomavirus type 136
aagttacaactgcaattgat

SEQ ID NO: 46741 - DNA, 20 bp, Human papillomavirus type 136
caactgcaattgatccagtt

SEQ ID NO: 46742 - DNA, 20 bp, Human papillomavirus type 136
atccagtttcagaagtagtt

SEQ ID NO: 46743 - DNA, 20 bp, Human papillomavirus type 136
cagaagtagttggtgtaggt

SEQ ID NO: 46744 - DNA, 20 bp, Human papillomavirus type 136
agagattattaactccactt

SEQ ID NO: 46745 - DNA, 20 bp, Human papillomavirus type 136
gagattattaactccacttg

SEQ ID NO: 46746 - DNA, 20 bp, Human papillomavirus type 136
ttaactccacttgtaaatgg

SEQ ID NO: 46747 - DNA, 20 bp, Human papillomavirus type 136
actccacttgtaaatggcct

SEQ ID NO: 46748 - DNA, 20 bp, Human papillomavirus type 136
taaatggcctgattttactc

SEQ ID NO: 46749 - DNA, 20 bp, Human papillomavirus type 136
gccccttcgacgtattatcc

SEQ ID NO: 46750 - DNA, 20 bp, Human papillomavirus type 136
gacgtattatccgacgccca

SEQ ID NO: 46751 - DNA, 20 bp, Human papillomavirus type 136
tccgacgcccagtggttcgt

SEQ ID NO: 46752 - DNA, 20 bp, Human papillomavirus type 136
gttagttagcagcgaatctc

SEQ ID NO: 46753 - DNA, 20 bp, Human papillomavirus type 136
gttagcagcgaatctcaaat

SEQ ID NO: 46754 - DNA, 20 bp, Human papillomavirus type 136
tgtaaagttcctctggaagc

SEQ ID NO: 46755 - DNA, 20 bp, Human papillomavirus type 136
ctctggaagctgatgtgcta

SEQ ID NO: 46756 - DNA, 20 bp, Human papillomavirus type 136
atgcaatggactctcgcatc

SEQ ID NO: 46757 - DNA, 20 bp, Human papillomavirus type 136
gatgactgggagttagcatt

SEQ ID NO: 46758 - DNA, 20 bp, Human papillomavirus type 136
cattaatgtgggctagcaca

SEQ ID NO: 46759 - DNA, 20 bp, Human papillomavirus type 136
atcagacaccattaggcaaa

SEQ ID NO: 46760 - DNA, 20 bp, Human papillomavirus type 136
ggcaaaaaattcttatatca

SEQ ID NO: 46761 - DNA, 20 bp, Human papillomavirus type 136
ttatatcagatgggattact

SEQ ID NO: 46762 - DNA, 20 bp, Human papillomavirus type 136
tatcagatgggattacttaa

SEQ ID NO: 46763 - DNA, 20 bp, Human papillomavirus type 136
cttaattcccgtaagcgacc

SEQ ID NO: 46764 - DNA, 20 bp, Human papillomavirus type 136
cttgatgtgtccactaataa

SEQ ID NO: 46765 - DNA, 20 bp, Human papillomavirus type 136
atgtgtccactaataaacaa

SEQ ID NO: 46766 - DNA, 20 bp, Human papillomavirus type 136
ctgactcattatattggtag

SEQ ID NO: 46767 - DNA, 20 bp, Human papillomavirus type 136
tattggtagtttaccctcct

SEQ ID NO: 46768 - DNA, 20 bp, Human papillomavirus type 136
gtagtttaccctcctattat

SEQ ID NO: 46769 - DNA, 20 bp, Human papillomavirus type 136
gtatagttttggcgcgttct

SEQ ID NO: 46770 - DNA, 20 bp, Human papillomavirus type 136
tggcgcgttctgcaaatcca

SEQ ID NO: 46771 - DNA, 20 bp, Human papillomavirus type 136
ggcgcgttctgcaaatccaa

SEQ ID NO: 46772 - DNA, 20 bp, Human papillomavirus type 136
gcgcgttctgcaaatccaac

SEQ ID NO: 46773 - DNA, 20 bp, Human papillomavirus type 136
tgcaaatccaaccgttaacg

SEQ ID NO: 46774 - DNA, 20 bp, Influenza A virus
cgacttccatggcttctgct

SEQ ID NO: 46775 - DNA, 20 bp, Influenza A virus
catggcttctgctgcctgct

SEQ ID NO: 46776 - DNA, 20 bp, Influenza A virus
tgctgcctgctcacttgatc

SEQ ID NO: 46777 - DNA, 20 bp, Influenza A virus
atccagccatctgctccatg

SEQ ID NO: 46778 - DNA, 20 bp, Influenza A virus
gccgtagtgctggctagtac

SEQ ID NO: 46779 - DNA, 20 bp, Influenza A virus
ttgcagcaagtatcattggg

SEQ ID NO: 46780 - DNA, 20 bp, Influenza A virus
cagcaagtatcattgggata

SEQ ID NO: 46781 - DNA, 20 bp, Influenza A virus
ggatattgcacttgatattg

SEQ ID NO: 46782 - DNA, 20 bp, Influenza A virus
cacttgatattgtggattct

SEQ ID NO: 46783 - DNA, 20 bp, Influenza A virus
atattgtggattcttgatcg

SEQ ID NO: 46784 - DNA, 20 bp, Human parainfluenza virus 3
ctggtgtccttattatcaat

SEQ ID NO: 46785 - DNA, 20 bp, Human parainfluenza virus 3
ttatcaatggcttatgccaa

SEQ ID NO: 46786 - DNA, 20 bp, Human parainfluenza virus 3
tcaatggcttatgccaatcc

SEQ ID NO: 46787 - DNA, 20 bp, Human parainfluenza virus 3
tgccaatccagagctctacc

SEQ ID NO: 46788 - DNA, 20 bp, Human parainfluenza virus 3
acatctgcattacttccatt

SEQ ID NO: 46789 - DNA, 20 bp, Human parainfluenza virus 3
gggtatccatcatgtttagg

SEQ ID NO: 46790 - DNA, 20 bp, Human parainfluenza virus 3
ggtatccatcatgtttagga

SEQ ID NO: 46791 - DNA, 20 bp, Human parainfluenza virus 3
aggagctcttataatacaga

SEQ ID NO: 46792 - DNA, 20 bp, Human parainfluenza virus 3
ggagctcttataatacagat

SEQ ID NO: 46793 - DNA, 20 bp, Human parainfluenza virus 3
taatacagatctggatagtt

SEQ ID NO: 46794 - DNA, 20 bp, Human parainfluenza virus 3
tacaaaatagagccatgcaa

SEQ ID NO: 46795 - DNA, 20 bp, Human parainfluenza virus 3
atatgttccagctaggacaa

SEQ ID NO: 46796 - DNA, 20 bp, Human parainfluenza virus 3
cagctaggacaagcagtagc

SEQ ID NO: 46797 - DNA, 20 bp, Human parainfluenza virus 3
agctcatctgagcttcagca

SEQ ID NO: 46798 - DNA, 20 bp, Human parainfluenza virus 3
agcatcacgtgctactgctt

SEQ ID NO: 46799 - DNA, 20 bp, Human parainfluenza virus 3
atggaaagcgatgctaaaaa

SEQ ID NO: 46800 - DNA, 20 bp, Human parainfluenza virus 3
ttgggaagaggaatcaagag

SEQ ID NO: 46801 - DNA, 20 bp, Human parainfluenza virus 3
ggaagaggaatcaagagata

SEQ ID NO: 46802 - DNA, 20 bp, Human parainfluenza virus 3
aattcatacttagcaccgac

SEQ ID NO: 46803 - DNA, 20 bp, Human parainfluenza virus 3
aatgatattgagggccgagg

SEQ ID NO: 46804 - DNA, 20 bp, Human parainfluenza virus 3
tgggttccatttttagaatt

SEQ ID NO: 46805 - DNA, 20 bp, Human parainfluenza virus 3
catttttagaatttgtgatg

SEQ ID NO: 46806 - DNA, 20 bp, Human parainfluenza virus 3
ttagaatttgtgatgcttct

SEQ ID NO: 46807 - DNA, 20 bp, Human parainfluenza virus 3
tagaatttgtgatgcttctg

SEQ ID NO: 46808 - DNA, 20 bp, Human parainfluenza virus 3
agaatttgtgatgcttctgg

SEQ ID NO: 46809 - DNA, 20 bp, Human parainfluenza virus 3
ataacaacacagatcgaacc

SEQ ID NO: 46810 - DNA, 20 bp, Human parainfluenza virus 3
ggttcgatctgtgttgttat

SEQ ID NO: 46811 - DNA, 20 bp, Human parainfluenza virus 3
gatctgtgttgttatcaatg

SEQ ID NO: 46812 - DNA, 20 bp, Human parainfluenza virus 3
ttatcaatggtgagattcca

SEQ ID NO: 46813 - DNA, 20 bp, Human parainfluenza virus 3
tcaatggtgagattccatga

SEQ ID NO: 46814 - DNA, 20 bp, Human parainfluenza virus 3
gacccacttatggagacaca

SEQ ID NO: 46815 - DNA, 20 bp, Human parainfluenza virus 3
acccacttatggagacacaa

SEQ ID NO: 46816 - DNA, 20 bp, Human parainfluenza virus 3
tggagacacaagggattgac

SEQ ID NO: 46817 - DNA, 20 bp, Human parainfluenza virus 3
acaagaatatacctgatcta

SEQ ID NO: 46818 - DNA, 20 bp, Human parainfluenza virus 3
aatcagagatattaagttca

SEQ ID NO: 46819 - DNA, 20 bp, Human parainfluenza virus 3
tttgaaaatggtcatataga

SEQ ID NO: 46820 - DNA, 20 bp, Human parainfluenza virus 3
gaaaatggtcatatagaacc

SEQ ID NO: 46821 - DNA, 20 bp, Human parainfluenza virus 3
aaaatggtcatatagaacca

SEQ ID NO: 46822 - DNA, 20 bp, Human parainfluenza virus 3
ccactcaaagtcaatgaaca

SEQ ID NO: 46823 - DNA, 20 bp, Human parainfluenza virus 3
gagttgccaaaatcggaaat

SEQ ID NO: 46824 - DNA, 20 bp, Human parainfluenza virus 3
gatgccaacaaagttgctct

SEQ ID NO: 46825 - DNA, 20 bp, Human parainfluenza virus 3
ctcttgctcctcaatgtctt

SEQ ID NO: 46826 - DNA, 20 bp, Human parainfluenza virus 3
ctcctcaatgtcttccacta

SEQ ID NO: 46827 - DNA, 20 bp, Human parainfluenza virus 3
cactagataggagcataaaa

SEQ ID NO: 46828 - DNA, 20 bp, Human parainfluenza virus 3
tatgctcctatctagtggaa

SEQ ID NO: 46829 - DNA, 20 bp, Human parainfluenza virus 3
caaccttctttacctggcga

SEQ ID NO: 46830 - DNA, 20 bp, Human parainfluenza virus 3
tttacctggcgaattcagat

SEQ ID NO: 46831 - DNA, 20 bp, Human parainfluenza virus 3
acctggcgaattcagatact

SEQ ID NO: 46832 - DNA, 20 bp, Human parainfluenza virus 3
cctggcgaattcagatacta

SEQ ID NO: 46833 - DNA, 20 bp, Human parainfluenza virus 3
agatactatcctaatattat

SEQ ID NO: 46834 - DNA, 20 bp, Human parainfluenza virus 3
ttggatagactgatcatccc

SEQ ID NO: 46835 - DNA, 20 bp, Human parainfluenza virus 3
gatagactgatcatccctct

SEQ ID NO: 46836 - DNA, 20 bp, Human parainfluenza virus 3
agattacagaaagatgtgat

SEQ ID NO: 46837 - DNA, 20 bp, Human parainfluenza virus 3
cagaaagatgtgatagtaac

SEQ ID NO: 46838 - DNA, 20 bp, Human parainfluenza virus 3
tgttctgggattagtgtttt

SEQ ID NO: 46839 - DNA, 20 bp, Human parainfluenza virus 3
attaactaggctgctgaaca

SEQ ID NO: 46840 - DNA, 20 bp, Human parainfluenza virus 3
ttaactaggctgctgaacac

SEQ ID NO: 46841 - DNA, 20 bp, Human parainfluenza virus 3
actaggctgctgaacactca

SEQ ID NO: 46842 - DNA, 20 bp, Human parainfluenza virus 3
catatcatataatatccaca

SEQ ID NO: 46843 - DNA, 20 bp, Human parainfluenza virus 3
ctcttcccagccatatcatg

SEQ ID NO: 46844 - DNA, 20 bp, Human parainfluenza virus 3
tacatgcaacggaatcggca

SEQ ID NO: 46845 - DNA, 20 bp, Human parainfluenza virus 3
taacacataaagaatgtagt

SEQ ID NO: 46846 - DNA, 20 bp, Human parainfluenza virus 3
cttctttgtttgtattgaac

SEQ ID NO: 46847 - DNA, 20 bp, Human parainfluenza virus 3
tttgtttgtattgaacagca

SEQ ID NO: 46848 - DNA, 20 bp, Human parainfluenza virus 3
gtttgtattgaacagcattc

SEQ ID NO: 46849 - DNA, 20 bp, Human parainfluenza virus 3
agaaagaacccaatagacaa

SEQ ID NO: 46850 - DNA, 20 bp, Human parainfluenza virus 3
gagatggaatactggaagca

SEQ ID NO: 46851 - DNA, 20 bp, Human parainfluenza virus 3
ccagcatcctttccgtgatt

SEQ ID NO: 46852 - DNA, 20 bp, Human parainfluenza virus 3
ccgtgattggtatgcttcca

SEQ ID NO: 46853 - DNA, 20 bp, Human parainfluenza virus 3
cgtgattggtatgcttccag

SEQ ID NO: 46854 - DNA, 20 bp, Human parainfluenza virus 3
aaatccagatgatttttgga

SEQ ID NO: 46855 - DNA, 20 bp, Human parainfluenza virus 3
aatccagatgatttttggag

SEQ ID NO: 46856 - DNA, 20 bp, Human parainfluenza virus 3
ttggaggtgcacgtctggtc

SEQ ID NO: 46857 - DNA, 20 bp, Human parainfluenza virus 3
tggaggtgcacgtctggtct

SEQ ID NO: 46858 - DNA, 20 bp, Human parainfluenza virus 3
ggaggtgcacgtctggtctt

SEQ ID NO: 46859 - DNA, 20 bp, Human parainfluenza virus 3
gaccagggatatattacaaa

SEQ ID NO: 46860 - DNA, 20 bp, Human parainfluenza virus 3
caaaggcaaaataatatttc

SEQ ID NO: 46861 - DNA, 20 bp, Human parainfluenza virus 3
ctcgggtatggaggtcttga

SEQ ID NO: 46862 - DNA, 20 bp, Human parainfluenza virus 3
tcgggtatggaggtcttgaa

SEQ ID NO: 46863 - DNA, 20 bp, Human parainfluenza virus 3
aacatccaataaatgagaat

SEQ ID NO: 46864 - DNA, 20 bp, Human parainfluenza virus 3
ctcaacagcaactgaaagag

SEQ ID NO: 46865 - DNA, 20 bp, Human parainfluenza virus 3
ctgatggccagctcgtttac

SEQ ID NO: 46866 - DNA, 20 bp, Human parainfluenza virus 3
tgatggccagctcgtttact

SEQ ID NO: 46867 - DNA, 20 bp, Human parainfluenza virus 3
actctttcagttgctgttga

SEQ ID NO: 46868 - DNA, 20 bp, Human parainfluenza virus 3
ctctttcagttgctgttgag

SEQ ID NO: 46869 - DNA, 20 bp, Human parainfluenza virus 3
atcataaatgcttacggttc

SEQ ID NO: 46870 - DNA, 20 bp, Human parainfluenza virus 3
cggttcaaactctgcgatat

SEQ ID NO: 46871 - DNA, 20 bp, Human parainfluenza virus 3
aaactctgcgatatcatatg

SEQ ID NO: 46872 - DNA, 20 bp, Human parainfluenza virus 3
attattaccagagcttcata

SEQ ID NO: 46873 - DNA, 20 bp, Human parainfluenza virus 3
ttaccagagcttcataggaa

SEQ ID NO: 46874 - DNA, 20 bp, Human parainfluenza virus 3
ttcctcaagctctgaaagca

SEQ ID NO: 46875 - DNA, 20 bp, Human parainfluenza virus 3
ctcaagctctgaaagcatta

SEQ ID NO: 46876 - DNA, 20 bp, Human parainfluenza virus 3
tctagatgtgtcttttggtc

SEQ ID NO: 46877 - DNA, 20 bp, Human parainfluenza virus 3
tggtcagagacagtaataga

SEQ ID NO: 46878 - DNA, 20 bp, Human parainfluenza virus 3
ggtcagagacagtaatagac

SEQ ID NO: 46879 - DNA, 20 bp, Human parainfluenza virus 3
taagaattcaaattggatgc

SEQ ID NO: 46880 - DNA, 20 bp, Human parainfluenza virus 3
aagaattcaaattggatgca

SEQ ID NO: 46881 - DNA, 20 bp, Human parainfluenza virus 3
agaattcaaattggatgcaa

SEQ ID NO: 46882 - DNA, 20 bp, Human parainfluenza virus 3
aaattggatgcaatatgcct

SEQ ID NO: 46883 - DNA, 20 bp, Human parainfluenza virus 3
gatgcaatatgcctctttaa

SEQ ID NO: 46884 - DNA, 20 bp, Human parainfluenza virus 3
ccatagcattgcgacaaaag

SEQ ID NO: 46885 - DNA, 20 bp, Human parainfluenza virus 3
cgacaaaagatgtggattca

SEQ ID NO: 46886 - DNA, 20 bp, Human parainfluenza virus 3
atttatcaggaggaaggatg

SEQ ID NO: 46887 - DNA, 20 bp, Human parainfluenza virus 3
atcaggaggaaggatgataa

SEQ ID NO: 46888 - DNA, 20 bp, Human parainfluenza virus 3
tcaggaggaaggatgataag

SEQ ID NO: 46889 - DNA, 20 bp, Human parainfluenza virus 3
gatggaagcctcacagatag

SEQ ID NO: 46890 - DNA, 20 bp, Human parainfluenza virus 3
tacactagatagtctcaaaa

SEQ ID NO: 46891 - DNA, 20 bp, Human parainfluenza virus 3
acactagatagtctcaaaat

SEQ ID NO: 46892 - DNA, 20 bp, Human parainfluenza virus 3
cactagatagtctcaaaatt

SEQ ID NO: 46893 - DNA, 20 bp, Human parainfluenza virus 3
taacaccggtagctacatca

SEQ ID NO: 46894 - DNA, 20 bp, Human coronavirus 229E
ttgctatggccggcatcttt

SEQ ID NO: 46895 - DNA, 20 bp, Human coronavirus 229E
tgctatggccggcatctttg

SEQ ID NO: 46896 - DNA, 20 bp, Human coronavirus 229E
gctatggccggcatctttga

SEQ ID NO: 46897 - DNA, 20 bp, Human coronavirus 229E
ctatggccggcatctttgat

SEQ ID NO: 46898 - DNA, 20 bp, Human coronavirus 229E
gatgctggagtcgtagtgta

SEQ ID NO: 46899 - DNA, 20 bp, Human coronavirus 229E
tactattgcgcaagccgtcc

SEQ ID NO: 46900 - DNA, 20 bp, Human coronavirus 229E
cgcaagccgtccgccgttat

SEQ ID NO: 46901 - DNA, 20 bp, Human coronavirus 229E
tagcgaggccgctagcaatg

SEQ ID NO: 46902 - DNA, 20 bp, Human coronavirus 229E
tagggcatgccgatttgttt

SEQ ID NO: 46903 - DNA, 20 bp, Human coronavirus 229E
agggcatgccgatttgtttc

SEQ ID NO: 46904 - DNA, 20 bp, Human coronavirus 229E
cggtgagaacgaagaaatta

SEQ ID NO: 46905 - DNA, 20 bp, Human coronavirus 229E
ggtgagaacgaagaaattat

SEQ ID NO: 46906 - DNA, 20 bp, Human coronavirus 229E
tcatcaatggtcatacttac

SEQ ID NO: 46907 - DNA, 20 bp, Human coronavirus 229E
cgtttgtgcttggcttacta

SEQ ID NO: 46908 - DNA, 20 bp, Human coronavirus 229E
gtgcttggcttactaagcgt

SEQ ID NO: 46909 - DNA, 20 bp, Human coronavirus 229E
caacatcctagaggccttta

SEQ ID NO: 46910 - DNA, 20 bp, Human coronavirus 229E
actaaacctgtgtttattag

SEQ ID NO: 46911 - DNA, 20 bp, Human coronavirus 229E
ctaaacctgtgtttattagt

SEQ ID NO: 46912 - DNA, 20 bp, Human coronavirus 229E
attagtgcattagttcaatg

SEQ ID NO: 46913 - DNA, 20 bp, Human coronavirus 229E
ttagtgcattagttcaatgt

SEQ ID NO: 46914 - DNA, 20 bp, Human coronavirus 229E
ctttgttgcttcttccactt

SEQ ID NO: 46915 - DNA, 20 bp, Human coronavirus 229E
gttgcttcttccacttttgt

SEQ ID NO: 46916 - DNA, 20 bp, Human coronavirus 229E
ttgcttcttccacttttgta

SEQ ID NO: 46917 - DNA, 20 bp, Human coronavirus 229E
cttcttccacttttgtagaa

SEQ ID NO: 46918 - DNA, 20 bp, Human coronavirus 229E
ttccacttttgtagaagagg

SEQ ID NO: 46919 - DNA, 20 bp, Human coronavirus 229E
gacgtgtttgtcacagctat

SEQ ID NO: 46920 - DNA, 20 bp, Human coronavirus 229E
acgtgtttgtcacagctatt

SEQ ID NO: 46921 - DNA, 20 bp, Human coronavirus 229E
gtcacagctattcaaactgt

SEQ ID NO: 46922 - DNA, 20 bp, Human coronavirus 229E
tcacagctattcaaactgtc

SEQ ID NO: 46923 - DNA, 20 bp, Human coronavirus 229E
aaactgtctttgactgtgct

SEQ ID NO: 46924 - DNA, 20 bp, Human coronavirus 229E
ttgttggttccactgaagaa

SEQ ID NO: 46925 - DNA, 20 bp, Human coronavirus 229E
ttggttccactgaagaagtt

SEQ ID NO: 46926 - DNA, 20 bp, Human coronavirus 229E
gttccactgaagaagttaaa

SEQ ID NO: 46927 - DNA, 20 bp, Human coronavirus 229E
cactgaagaagttaaatctt

SEQ ID NO: 46928 - DNA, 20 bp, Human coronavirus 229E
aatcttcacgtgttgaacgt

SEQ ID NO: 46929 - DNA, 20 bp, Human coronavirus 229E
acaaatgggatgatttttgc

SEQ ID NO: 46930 - DNA, 20 bp, Human coronavirus 229E
ttgcagacaatatagtaacg

SEQ ID NO: 46931 - DNA, 20 bp, Human coronavirus 229E
tgcagacaatatagtaacga

SEQ ID NO: 46932 - DNA, 20 bp, Human coronavirus 229E
gcagacaatatagtaacgag

SEQ ID NO: 46933 - DNA, 20 bp, Human coronavirus 229E
cagacaatatagtaacgagt

SEQ ID NO: 46934 - DNA, 20 bp, Human coronavirus 229E
taaacgttggcttggcattt

SEQ ID NO: 46935 - DNA, 20 bp, Human coronavirus 229E
aaacgttggcttggcatttt

SEQ ID NO: 46936 - DNA, 20 bp, Human coronavirus 229E
aacgttggcttggcattttg

SEQ ID NO: 46937 - DNA, 20 bp, Human coronavirus 229E
gcttggcattttgctagagg

SEQ ID NO: 46938 - DNA, 20 bp, Human coronavirus 229E
gcattttgctagaggcctat

SEQ ID NO: 46939 - DNA, 20 bp, Human coronavirus 229E
cgagagtgcttacatgccaa

SEQ ID NO: 46940 - DNA, 20 bp, Human coronavirus 229E
gagagtgcttacatgccaat

SEQ ID NO: 46941 - DNA, 20 bp, Human coronavirus 229E
catgccaattgcagacccta

SEQ ID NO: 46942 - DNA, 20 bp, Human coronavirus 229E
cagaccctacacattttgac

SEQ ID NO: 46943 - DNA, 20 bp, Human coronavirus 229E
tgacattgaagaagttgaac

SEQ ID NO: 46944 - DNA, 20 bp, Human coronavirus 229E
tagatgtttgtgaaaaggca

SEQ ID NO: 46945 - DNA, 20 bp, Human coronavirus 229E
gtgaaaaggcaattggcaag

SEQ ID NO: 46946 - DNA, 20 bp, Human coronavirus 229E
tgaaaaggcaattggcaaga

SEQ ID NO: 46947 - DNA, 20 bp, Human coronavirus 229E
gcaagaaaattaaacatgaa

SEQ ID NO: 46948 - DNA, 20 bp, Human coronavirus 229E
aacatgaaggtgactgggat

SEQ ID NO: 46949 - DNA, 20 bp, Human coronavirus 229E
actcagttatgttacaaata

SEQ ID NO: 46950 - DNA, 20 bp, Human coronavirus 229E
tgttacaaatacaattaact

SEQ ID NO: 46951 - DNA, 20 bp, Human coronavirus 229E
caaatacaattaactggtat

SEQ ID NO: 46952 - DNA, 20 bp, Human coronavirus 229E
actggtatacttgatggtga

SEQ ID NO: 46953 - DNA, 20 bp, Human coronavirus 229E
atggtgactatgctatgcag

SEQ ID NO: 46954 - DNA, 20 bp, Human coronavirus 229E
aagaatcgggagctgttttg

SEQ ID NO: 46955 - DNA, 20 bp, Human coronavirus 229E
tgttttgtacgcccactaag

SEQ ID NO: 46956 - DNA, 20 bp, Human coronavirus 229E
gttttgtacgcccactaaga

SEQ ID NO: 46957 - DNA, 20 bp, Human coronavirus 229E
ttttgtacgcccactaagaa

SEQ ID NO: 46958 - DNA, 20 bp, Human coronavirus 229E
tgtacgcccactaagaaggc

SEQ ID NO: 46959 - DNA, 20 bp, Human coronavirus 229E
aaaatacagttgatacaaca

SEQ ID NO: 46960 - DNA, 20 bp, Human coronavirus 229E
atacaacacctaaggaagaa

SEQ ID NO: 46961 - DNA, 20 bp, Human coronavirus 229E
gttgttaaagagaagttgaa

SEQ ID NO: 46962 - DNA, 20 bp, Human coronavirus 229E
ttgttaaagagaagttgaac

SEQ ID NO: 46963 - DNA, 20 bp, Human coronavirus 229E
ttaaagagaagttgaacgcc

SEQ ID NO: 46964 - DNA, 20 bp, Human coronavirus 229E
agtgaatgttcaaaaagttg

SEQ ID NO: 46965 - DNA, 20 bp, Human coronavirus 229E
gtgaatgttcaaaaagttga

SEQ ID NO: 46966 - DNA, 20 bp, Human coronavirus 229E
aaaaagttgagcaacctaaa

SEQ ID NO: 46967 - DNA, 20 bp, Human coronavirus 229E
agcaacctaaaatagaacca

SEQ ID NO: 46968 - DNA, 20 bp, Human coronavirus 229E
aagttgcacccaagccttac

SEQ ID NO: 46969 - DNA, 20 bp, Human coronavirus 229E
tgccatccgaaaaggacaaa

SEQ ID NO: 46970 - DNA, 20 bp, Human coronavirus 229E
agataataatgttcaacgat

SEQ ID NO: 46971 - DNA, 20 bp, Human coronavirus 229E
gataataatgttcaacgatg

SEQ ID NO: 46972 - DNA, 20 bp, Human coronavirus 229E
aacgatgcacacgtaagttg

SEQ ID NO: 46973 - DNA, 20 bp, Human coronavirus 229E
aatagacttatgtgtgatat

SEQ ID NO: 46974 - DNA, 20 bp, Human coronavirus 229E
acacatctgaattgcttact

SEQ ID NO: 46975 - DNA, 20 bp, Human coronavirus 229E
cttactaaagcaatagatgt

SEQ ID NO: 46976 - DNA, 20 bp, Human coronavirus 229E
ctaaagcaatagatgttgat

SEQ ID NO: 46977 - DNA, 20 bp, Human coronavirus 229E
attgggtcgaattttatggc

SEQ ID NO: 46978 - DNA, 20 bp, Human coronavirus 229E
ggtcgaattttatggcttta

SEQ ID NO: 46979 - DNA, 20 bp, Human coronavirus 229E
gttattgtgtccatggtatt

SEQ ID NO: 46980 - DNA, 20 bp, Human coronavirus 229E
ttgtgtccatggtattaagt

SEQ ID NO: 46981 - DNA, 20 bp, Human coronavirus 229E
tgtccatggtattaagtact

SEQ ID NO: 46982 - DNA, 20 bp, Human coronavirus 229E
agtactattcacgtgttaga

SEQ ID NO: 46983 - DNA, 20 bp, Human coronavirus 229E
acgtgttagaagtgttagag

SEQ ID NO: 46984 - DNA, 20 bp, Human coronavirus 229E
ttttaaaacgtagtcttaaa

SEQ ID NO: 46985 - DNA, 20 bp, Human coronavirus 229E
taaaacgtagtcttaaatat

SEQ ID NO: 46986 - DNA, 20 bp, Human coronavirus 229E
aaaacgtagtcttaaatata

SEQ ID NO: 46987 - DNA, 20 bp, Human coronavirus 229E
aaacgtagtcttaaatataa

SEQ ID NO: 46988 - DNA, 20 bp, Human coronavirus 229E
aatataacttaaaagcgtca

SEQ ID NO: 46989 - DNA, 20 bp, Human coronavirus 229E
attgggctgcaagatgtgtc

SEQ ID NO: 46990 - DNA, 20 bp, Human coronavirus 229E
ggctgcaagatgtgtctttt

SEQ ID NO: 46991 - DNA, 20 bp, Human coronavirus 229E
ttggttaccaagagttaagt

SEQ ID NO: 46992 - DNA, 20 bp, Human coronavirus 229E
tggttaccaagagttaagtc

SEQ ID NO: 46993 - DNA, 20 bp, Human coronavirus 229E
ggttaccaagagttaagtca

SEQ ID NO: 46994 - DNA, 20 bp, Human coronavirus 229E
tattgcgtgttctaagagtg

SEQ ID NO: 46995 - DNA, 20 bp, Human coronavirus 229E
cgtgttctaagagtgctaga

SEQ ID NO: 46996 - DNA, 20 bp, Human coronavirus 229E
taagagtgctagacttaaga

SEQ ID NO: 46997 - DNA, 20 bp, Human coronavirus 229E
agagattccctgttaacaca

SEQ ID NO: 46998 - DNA, 20 bp, Human coronavirus 229E
cctgttaacacaattgtcaa

SEQ ID NO: 46999 - DNA, 20 bp, Human coronavirus 229E
aggcctgtctattagtgatc

SEQ ID NO: 47000 - DNA, 20 bp, Human coronavirus 229E
ggcctgtctattagtgatca

SEQ ID NO: 47001 - DNA, 20 bp, Human coronavirus 229E
gtgatcatgaatttactagt

SEQ ID NO: 47002 - DNA, 20 bp, Human coronavirus 229E
actagtgctatttctaatgc

SEQ ID NO: 47003 - DNA, 20 bp, Human coronavirus 229E
ctagtgctatttctaatgca

SEQ ID NO: 47004 - DNA, 20 bp, Human coronavirus 229E
gactttcttgttgacaatta

SEQ ID NO: 47005 - DNA, 20 bp, Human coronavirus 229E
actttcttgttgacaattaa

SEQ ID NO: 47006 - DNA, 20 bp, Human coronavirus 229E
cttgttgacaattaatgaaa

SEQ ID NO: 47007 - DNA, 20 bp, Human coronavirus 229E
ttgttgacaattaatgaaaa

SEQ ID NO: 47008 - DNA, 20 bp, Human coronavirus 229E
ttgacaattaatgaaaacca

SEQ ID NO: 47009 - DNA, 20 bp, Human coronavirus 229E
tagttggagtttctgaaatt

SEQ ID NO: 47010 - DNA, 20 bp, Human coronavirus 229E
gagtttctgaaattgttaat

SEQ ID NO: 47011 - DNA, 20 bp, Human coronavirus 229E
ctgaaattgttaatactgtc

SEQ ID NO: 47012 - DNA, 20 bp, Human coronavirus 229E
tgaaattgttaatactgtcg

SEQ ID NO: 47013 - DNA, 20 bp, Human coronavirus 229E
ttaatactgtcgctggcatt

SEQ ID NO: 47014 - DNA, 20 bp, Human coronavirus 229E
ccaccaaatactgccgcgta

SEQ ID NO: 47015 - DNA, 20 bp, Human coronavirus 229E
aatccaatgcaggtgtgtgt

SEQ ID NO: 47016 - DNA, 20 bp, Human coronavirus 229E
tggctttgacaagtggtttg

SEQ ID NO: 47017 - DNA, 20 bp, Human coronavirus 229E
ggctttgacaagtggtttgt

SEQ ID NO: 47018 - DNA, 20 bp, Human coronavirus 229E
gctttgacaagtggtttgtt

SEQ ID NO: 47019 - DNA, 20 bp, Human coronavirus 229E
cgctatgcatggatttggtg

SEQ ID NO: 47020 - DNA, 20 bp, Human coronavirus 229E
ggtgtgctgcatatttaatt

SEQ ID NO: 47021 - DNA, 20 bp, Human coronavirus 229E
gtgtgctgcatatttaattg

SEQ ID NO: 47022 - DNA, 20 bp, Human coronavirus 229E
aattgcgtatatttcttttg

SEQ ID NO: 47023 - DNA, 20 bp, Human coronavirus 229E
attgcgtatatttcttttgc

SEQ ID NO: 47024 - DNA, 20 bp, Human coronavirus 229E
tacacacctccgactgtcag

SEQ ID NO: 47025 - DNA, 20 bp, Human coronavirus 229E
tggttctacattacaggctg

SEQ ID NO: 47026 - DNA, 20 bp, Human coronavirus 229E
tacattacaggctggtttgc

SEQ ID NO: 47027 - DNA, 20 bp, Human coronavirus 229E
caggctggtttgcgcaaaat

SEQ ID NO: 47028 - DNA, 20 bp, Human coronavirus 229E
gcgcaaaatggcacaaccat

SEQ ID NO: 47029 - DNA, 20 bp, Human coronavirus 229E
aggtttcacagactaacatg

SEQ ID NO: 47030 - DNA, 20 bp, Human coronavirus 229E
cacagactaacatgcacaca

SEQ ID NO: 47031 - DNA, 20 bp, Human coronavirus 229E
acagactaacatgcacacac

SEQ ID NO: 47032 - DNA, 20 bp, Human coronavirus 229E
ttttagaacactaaaatctg

SEQ ID NO: 47033 - DNA, 20 bp, Human coronavirus 229E
tagaacactaaaatctggtg

SEQ ID NO: 47034 - DNA, 20 bp, Human coronavirus 229E
aagttgaatctgcaaaccag

SEQ ID NO: 47035 - DNA, 20 bp, Human coronavirus 229E
aatctgcaaaccagatgtta

SEQ ID NO: 47036 - DNA, 20 bp, Human coronavirus 229E
acagttaatgtggttgcatt

SEQ ID NO: 47037 - DNA, 20 bp, Human coronavirus 229E
atgtggttgcatttctttat

SEQ ID NO: 47038 - DNA, 20 bp, Human coronavirus 229E
catttctttatgctgctata

SEQ ID NO: 47039 - DNA, 20 bp, Human coronavirus 229E
tttgtcatgttctgggctga

SEQ ID NO: 47040 - DNA, 20 bp, Human coronavirus 229E
gtcatgttctgggctgaatt

SEQ ID NO: 47041 - DNA, 20 bp, Human coronavirus 229E
tcatgttctgggctgaatta

SEQ ID NO: 47042 - DNA, 20 bp, Human coronavirus 229E
tgggctgaattatttgttta

SEQ ID NO: 47043 - DNA, 20 bp, Human coronavirus 229E
tttgtttataccaccactat

SEQ ID NO: 47044 - DNA, 20 bp, Human coronavirus 229E
catacttggcgctttgctaa

SEQ ID NO: 47045 - DNA, 20 bp, Human coronavirus 229E
gcgctttgctaaagagcgtt

SEQ ID NO: 47046 - DNA, 20 bp, Human coronavirus 229E
gctaaagagcgttgtacaca

SEQ ID NO: 47047 - DNA, 20 bp, Human coronavirus 229E
ctaaagagcgttgtacacat

SEQ ID NO: 47048 - DNA, 20 bp, Human coronavirus 229E
tacacattggtgcacttatt

SEQ ID NO: 47049 - DNA, 20 bp, Human coronavirus 229E
tactggattaacaggttctg

SEQ ID NO: 47050 - DNA, 20 bp, Human coronavirus 229E
acaggttctgtaagtgcaca

SEQ ID NO: 47051 - DNA, 20 bp, Human coronavirus 229E
tgtaagtgcacattaggtgt

SEQ ID NO: 47052 - DNA, 20 bp, Human coronavirus 229E
ggtgtttatgatttctgtgt

SEQ ID NO: 47053 - DNA, 20 bp, Human coronavirus 229E
atgatttctgtgttagtcca

SEQ ID NO: 47054 - DNA, 20 bp, Human coronavirus 229E
tgtctaacatgaacatagct

SEQ ID NO: 47055 - DNA, 20 bp, Human coronavirus 229E
gtctaacatgaacatagctt

SEQ ID NO: 47056 - DNA, 20 bp, Human coronavirus 229E
tctaacatgaacatagcttc

SEQ ID NO: 47057 - DNA, 20 bp, Human coronavirus 229E
taattcaaaggagtgggcat

SEQ ID NO: 47058 - DNA, 20 bp, Human coronavirus 229E
aaaggagtgggcatattgtg

SEQ ID NO: 47059 - DNA, 20 bp, Human coronavirus 229E
caaaagctgagtttgacagg

SEQ ID NO: 47060 - DNA, 20 bp, Human coronavirus 229E
gacagggaatcatctgttca

SEQ ID NO: 47061 - DNA, 20 bp, Human coronavirus 229E
acagggaatcatctgttcaa

SEQ ID NO: 47062 - DNA, 20 bp, Human coronavirus 229E
aaaagaaaattaacagaatg

SEQ ID NO: 47063 - DNA, 20 bp, Human coronavirus 229E
acagaatggctgaacaagct

SEQ ID NO: 47064 - DNA, 20 bp, Human coronavirus 229E
tttggacattacaggaagtt

SEQ ID NO: 47065 - DNA, 20 bp, Human coronavirus 229E
ggacattacaggaagttaag

SEQ ID NO: 47066 - DNA, 20 bp, Human coronavirus 229E
gacattacaggaagttaagg

SEQ ID NO: 47067 - DNA, 20 bp, Human coronavirus 229E
caggaagttaaggataatga

SEQ ID NO: 47068 - DNA, 20 bp, Human coronavirus 229E
aggataatgatggtaagaat

SEQ ID NO: 47069 - DNA, 20 bp, Human coronavirus 229E
aatgggaacatgactctggt

SEQ ID NO: 47070 - DNA, 20 bp, Human coronavirus 229E
cagttgaattggaaccacct

SEQ ID NO: 47071 - DNA, 20 bp, Human coronavirus 229E
aattggaaccaccttgcaga

SEQ ID NO: 47072 - DNA, 20 bp, Human coronavirus 229E
gaaccaccttgcagatttgt

SEQ ID NO: 47073 - DNA, 20 bp, Human coronavirus 229E
cagatttgttatagacacac

SEQ ID NO: 47074 - DNA, 20 bp, Human coronavirus 229E
atgctgttaaacaaggcgca

SEQ ID NO: 47075 - DNA, 20 bp, Human coronavirus 229E
aacaaggcgcaaaacctgtt

SEQ ID NO: 47076 - DNA, 20 bp, Human coronavirus 229E
gcaattgtgtaaagatgttg

SEQ ID NO: 47077 - DNA, 20 bp, Human coronavirus 229E
tgtaaagatgttgactaatg

SEQ ID NO: 47078 - DNA, 20 bp, Human coronavirus 229E
actaatggttctggtagcgg

SEQ ID NO: 47079 - DNA, 20 bp, Human coronavirus 229E
tgataacagttatttaaacg

SEQ ID NO: 47080 - DNA, 20 bp, Human coronavirus 229E
gataacagttatttaaacga

SEQ ID NO: 47081 - DNA, 20 bp, Human coronavirus 229E
ataacagttatttaaacgag

SEQ ID NO: 47082 - DNA, 20 bp, Human coronavirus 229E
tttaaacgagtccggggctc

SEQ ID NO: 47083 - DNA, 20 bp, Human coronavirus 229E
aaacgagtccggggctctag

SEQ ID NO: 47084 - DNA, 20 bp, Human coronavirus 229E
ctaaatacaccatgatggat

SEQ ID NO: 47085 - DNA, 20 bp, Human coronavirus 229E
gtgcttcgctctgcgtaact

SEQ ID NO: 47086 - DNA, 20 bp, Human coronavirus 229E
tgcttcgctctgcgtaactt

SEQ ID NO: 47087 - DNA, 20 bp, Human coronavirus 229E
gctctgcgtaactttgatga

SEQ ID NO: 47088 - DNA, 20 bp, Human coronavirus 229E
gatgaaaaagactgtgaagt

SEQ ID NO: 47089 - DNA, 20 bp, Human coronavirus 229E
ggtgactttgtattgtgtcc

SEQ ID NO: 47090 - DNA, 20 bp, Human coronavirus 229E
gtattgtgtcctcctggaat

SEQ ID NO: 47091 - DNA, 20 bp, Human coronavirus 229E
tattgtgtcctcctggaatg

SEQ ID NO: 47092 - DNA, 20 bp, Human coronavirus 229E
tgtcctcctggaatgggaat

SEQ ID NO: 47093 - DNA, 20 bp, Human coronavirus 229E
ttatatgatgcctgttatgg

SEQ ID NO: 47094 - DNA, 20 bp, Human coronavirus 229E
caaacacggcttttggacct

SEQ ID NO: 47095 - DNA, 20 bp, Human coronavirus 229E
tggacctctatgcagaaaag

SEQ ID NO: 47096 - DNA, 20 bp, Human coronavirus 229E
ggacctctatgcagaaaagt

SEQ ID NO: 47097 - DNA, 20 bp, Human coronavirus 229E
gacctctatgcagaaaagtg

SEQ ID NO: 47098 - DNA, 20 bp, Human coronavirus 229E
attgatggtgtacccgtagt

SEQ ID NO: 47099 - DNA, 20 bp, Human coronavirus 229E
taataaggagttttatgact

SEQ ID NO: 47100 - DNA, 20 bp, Human coronavirus 229E
aataaggagttttatgactt

SEQ ID NO: 47101 - DNA, 20 bp, Human coronavirus 229E
ataaggagttttatgacttc

SEQ ID NO: 47102 - DNA, 20 bp, Human coronavirus 229E
tatgacttcttacgttctca

SEQ ID NO: 47103 - DNA, 20 bp, Human coronavirus 229E
atgacttcttacgttctcag

SEQ ID NO: 47104 - DNA, 20 bp, Human coronavirus 229E
attagctactatgactacaa

SEQ ID NO: 47105 - DNA, 20 bp, Human coronavirus 229E
ttagctactatgactacaag

SEQ ID NO: 47106 - DNA, 20 bp, Human coronavirus 229E
gctactatgactacaagaca

SEQ ID NO: 47107 - DNA, 20 bp, Human coronavirus 229E
catcagaaatgtctgaaatc

SEQ ID NO: 47108 - DNA, 20 bp, Human coronavirus 229E
atcagaaatgtctgaaatcc

SEQ ID NO: 47109 - DNA, 20 bp, Human coronavirus 229E
tttctgatgatagtgttgtg

SEQ ID NO: 47110 - DNA, 20 bp, Human coronavirus 229E
ctgatgatagtgttgtgtgc

SEQ ID NO: 47111 - DNA, 20 bp, Human coronavirus 229E
tgatgatagtgttgtgtgct

SEQ ID NO: 47112 - DNA, 20 bp, Human coronavirus 229E
tgtgctataataaaacttat

SEQ ID NO: 47113 - DNA, 20 bp, Human coronavirus 229E
tgctggacttggttacattg

SEQ ID NO: 47114 - DNA, 20 bp, Human coronavirus 229E
ttttggaacgctatgtttct

SEQ ID NO: 47115 - DNA, 20 bp, Human coronavirus 229E
tggaacgctatgtttctctg

SEQ ID NO: 47116 - DNA, 20 bp, Human coronavirus 229E
ggaacgctatgtttctctgg

SEQ ID NO: 47117 - DNA, 20 bp, Human coronavirus 229E
gaacgctatgtttctctggc

SEQ ID NO: 47118 - DNA, 20 bp, Human coronavirus 229E
ctctggctatagatgcctac

SEQ ID NO: 47119 - DNA, 20 bp, Human coronavirus 229E
attcccactgtgttcagctg

SEQ ID NO: 47120 - DNA, 20 bp, Human coronavirus 229E
ccactgtgttcagctggtaa

SEQ ID NO: 47121 - DNA, 20 bp, Human coronavirus 229E
agctggtaatgtctttggtt

SEQ ID NO: 47122 - DNA, 20 bp, Human coronavirus 229E
ggtttgtacaaaagttctgc

SEQ ID NO: 47123 - DNA, 20 bp, Human coronavirus 229E
gtttgtacaaaagttctgct

SEQ ID NO: 47124 - DNA, 20 bp, Human coronavirus 229E
caagttggtgagtttgtgtt

SEQ ID NO: 47125 - DNA, 20 bp, Human coronavirus 229E
aagttggtgagtttgtgttt

SEQ ID NO: 47126 - DNA, 20 bp, Human coronavirus 229E
gtgagtttgtgtttgagaaa

SEQ ID NO: 47127 - DNA, 20 bp, Human coronavirus 229E
gtgtttgagaaagtagatta

SEQ ID NO: 47128 - DNA, 20 bp, Human coronavirus 229E
tgtttgagaaagtagattac

SEQ ID NO: 47129 - DNA, 20 bp, Human coronavirus 229E
ttctattggtattggtgtgt

SEQ ID NO: 47130 - DNA, 20 bp, Human coronavirus 229E
tattggtattggtgtgtatt

SEQ ID NO: 47131 - DNA, 20 bp, Human coronavirus 229E
gtattggtgtgtattaccct

SEQ ID NO: 47132 - DNA, 20 bp, Human coronavirus 229E
gtgtgtattaccctggagcg

SEQ ID NO: 47133 - DNA, 20 bp, Human coronavirus 229E
ccctggagcgaggatcgtgt

SEQ ID NO: 47134 - DNA, 20 bp, Human coronavirus 229E
tctgtgattaaccagcgtat

SEQ ID NO: 47135 - DNA, 20 bp, Human coronavirus 229E
accagcgtatatcatataaa

SEQ ID NO: 47136 - DNA, 20 bp, Human coronavirus 229E
tatatgttggtgatcctcaa

SEQ ID NO: 47137 - DNA, 20 bp, Human coronavirus 229E
gtgatcctcaacagcttcca

SEQ ID NO: 47138 - DNA, 20 bp, Human coronavirus 229E
cagctcctagagttcttatc

SEQ ID NO: 47139 - DNA, 20 bp, Human coronavirus 229E
atctcaccttacaatagtca

SEQ ID NO: 47140 - DNA, 20 bp, Human coronavirus 229E
tctcaccttacaatagtcaa

SEQ ID NO: 47141 - DNA, 20 bp, Human coronavirus 229E
caatagtcaaaattatgtag

SEQ ID NO: 47142 - DNA, 20 bp, Human coronavirus 229E
tgtagctgccaggcttttag

SEQ ID NO: 47143 - DNA, 20 bp, Human coronavirus 229E
taggcttacaaactcagaca

SEQ ID NO: 47144 - DNA, 20 bp, Human coronavirus 229E
atttaccaccaagtcatgcc

SEQ ID NO: 47145 - DNA, 20 bp, Human coronavirus 229E
accaccaagtcatgccacta

SEQ ID NO: 47146 - DNA, 20 bp, Human coronavirus 229E
ccaccaagtcatgccactac

SEQ ID NO: 47147 - DNA, 20 bp, Human coronavirus 229E
tttgtcattgtctgatagat

SEQ ID NO: 47148 - DNA, 20 bp, Human coronavirus 229E
gtcattgtctgatagattta

SEQ ID NO: 47149 - DNA, 20 bp, Human coronavirus 229E
ggaatggatgtggaaggtgc

SEQ ID NO: 47150 - DNA, 20 bp, Human coronavirus 229E
gcactaatgtacctctacaa

SEQ ID NO: 47151 - DNA, 20 bp, Human coronavirus 229E
gtttttccaatggtgttgat

SEQ ID NO: 47152 - DNA, 20 bp, Human coronavirus 229E
ttccaatggtgttgattttg

SEQ ID NO: 47153 - DNA, 20 bp, Human coronavirus 229E
tccaatggtgttgattttgt

SEQ ID NO: 47154 - DNA, 20 bp, Human coronavirus 229E
agagttgaccactatgcgtt

SEQ ID NO: 47155 - DNA, 20 bp, Human coronavirus 229E
gagttgaccactatgcgtta

SEQ ID NO: 47156 - DNA, 20 bp, Human coronavirus 229E
accactatgcgttattttgt

SEQ ID NO: 47157 - DNA, 20 bp, Human coronavirus 229E
ttttgttaagattggagctg

SEQ ID NO: 47158 - DNA, 20 bp, Human coronavirus 229E
tgttaagattggagctgtta

SEQ ID NO: 47159 - DNA, 20 bp, Human coronavirus 229E
gtcaattacctaccctatga

SEQ ID NO: 47160 - DNA, 20 bp, Human coronavirus 229E
cctaccctatgatagctaat

SEQ ID NO: 47161 - DNA, 20 bp, Human coronavirus 229E
tgcgtgctgctattaaattg

SEQ ID NO: 47162 - DNA, 20 bp, Human coronavirus 229E
aatagcagcacgcataatat

SEQ ID NO: 47163 - DNA, 20 bp, Human coronavirus 229E
atagcagcacgcataatatg

SEQ ID NO: 47164 - DNA, 20 bp, Human coronavirus 229E
gacacacgtacacgatctac

SEQ ID NO: 47165 - DNA, 20 bp, Human coronavirus 229E
acacacgtacacgatctaca

SEQ ID NO: 47166 - DNA, 20 bp, Human coronavirus 229E
aaccttgaaggtgtaaatgg

SEQ ID NO: 47167 - DNA, 20 bp, Human coronavirus 229E
aaggtgtaaatggtgggtca

SEQ ID NO: 47168 - DNA, 20 bp, Human coronavirus 229E
tatgtcaataatcatgcatt

SEQ ID NO: 47169 - DNA, 20 bp, Human coronavirus 229E
taatatttgggttcctacca

SEQ ID NO: 47170 - DNA, 20 bp, Human coronavirus 229E
aatatttgggttcctaccac

SEQ ID NO: 47171 - DNA, 20 bp, Human coronavirus 229E
atatttgggttcctaccacg

SEQ ID NO: 47172 - DNA, 20 bp, Human coronavirus 229E
gggttcctaccacgtttgat

SEQ ID NO: 47173 - DNA, 20 bp, Human coronavirus 229E
ggttcctaccacgtttgatt

SEQ ID NO: 47174 - DNA, 20 bp, Human coronavirus 229E
gtcttgtgggattatgaagc

SEQ ID NO: 47175 - DNA, 20 bp, Human coronavirus 229E
tcttgtgggattatgaagct

SEQ ID NO: 47176 - DNA, 20 bp, Human coronavirus 229E
tgggattatgaagctgagcg

SEQ ID NO: 47177 - DNA, 20 bp, Human coronavirus 229E
tgaagctgagcgtcccttga

SEQ ID NO: 47178 - DNA, 20 bp, Human coronavirus 229E
acaagctttactaagtctgt

SEQ ID NO: 47179 - DNA, 20 bp, Human coronavirus 229E
atcattatgatggtttttat

SEQ ID NO: 47180 - DNA, 20 bp, Human coronavirus 229E
tgatggtttttatacccaag

SEQ ID NO: 47181 - DNA, 20 bp, Human coronavirus 229E
ttatacccaaggtcgtaatt

SEQ ID NO: 47182 - DNA, 20 bp, Human coronavirus 229E
tatacccaaggtcgtaattt

SEQ ID NO: 47183 - DNA, 20 bp, Human coronavirus 229E
atacccaaggtcgtaattta

SEQ ID NO: 47184 - DNA, 20 bp, Human coronavirus 229E
tacttacatggatttgttgt

SEQ ID NO: 47185 - DNA, 20 bp, Human coronavirus 229E
catggatttgttgttggatg

SEQ ID NO: 47186 - DNA, 20 bp, Human coronavirus 229E
gttgttggatgattttgttt

SEQ ID NO: 47187 - DNA, 20 bp, Human coronavirus 229E
ttgttggatgattttgtttc

SEQ ID NO: 47188 - DNA, 20 bp, Human coronavirus 229E
ttggatgattttgtttctgt

SEQ ID NO: 47189 - DNA, 20 bp, Human coronavirus 229E
tgtgttcctcataatatgag

SEQ ID NO: 47190 - DNA, 20 bp, Human coronavirus 229E
ctcataatatgagagtgtta

SEQ ID NO: 47191 - DNA, 20 bp, Human coronavirus 229E
cacttgggtgctggctctga

SEQ ID NO: 47192 - DNA, 20 bp, Human coronavirus 229E
ggtgctggctctgattatgg

SEQ ID NO: 47193 - DNA, 20 bp, Human coronavirus 229E
tggtgttgcaccaggaactg

SEQ ID NO: 47194 - DNA, 20 bp, Human coronavirus 229E
gtgatttcgcacaaggacct

SEQ ID NO: 47195 - DNA, 20 bp, Human coronavirus 229E
cgcacaaggaccttttatag

SEQ ID NO: 47196 - DNA, 20 bp, Human coronavirus 229E
gcacaaggaccttttataga

SEQ ID NO: 47197 - DNA, 20 bp, Human coronavirus 229E
tatagatggtaacataatac

SEQ ID NO: 47198 - DNA, 20 bp, Human coronavirus 229E
atagatggtaacataataca

SEQ ID NO: 47199 - DNA, 20 bp, Human coronavirus 229E
tcaaactacaaatgggctga

SEQ ID NO: 47200 - DNA, 20 bp, Human coronavirus 229E
ctctgtttgcaacggctgtg

SEQ ID NO: 47201 - DNA, 20 bp, Human coronavirus 229E
gcaacggctgtgttggttat

SEQ ID NO: 47202 - DNA, 20 bp, Human coronavirus 229E
caacggctgtgttggttatt

SEQ ID NO: 47203 - DNA, 20 bp, Human coronavirus 229E
gttattcagaaaatgtattt

SEQ ID NO: 47204 - DNA, 20 bp, Human coronavirus 229E
gtacagttttgggcaatttt

SEQ ID NO: 47205 - DNA, 20 bp, Human coronavirus 229E
tgggcaatttttattgcttt

SEQ ID NO: 47206 - DNA, 20 bp, Human coronavirus 229E
gggcaatttttattgctttg

SEQ ID NO: 47207 - DNA, 20 bp, Human coronavirus 229E
ggcaatttttattgctttgt

SEQ ID NO: 47208 - DNA, 20 bp, Human coronavirus 229E
ttattgctttgtaaatacta

SEQ ID NO: 47209 - DNA, 20 bp, Human coronavirus 229E
aatccgttgagctacctgtg

SEQ ID NO: 47210 - DNA, 20 bp, Human coronavirus 229E
agctacctgtgtctattgtg

SEQ ID NO: 47211 - DNA, 20 bp, Human coronavirus 229E
tgtcgctacctgtttatcat

SEQ ID NO: 47212 - DNA, 20 bp, Human coronavirus 229E
atcataaacatacgtttatt

SEQ ID NO: 47213 - DNA, 20 bp, Human coronavirus 229E
tcataaacatacgtttattg

SEQ ID NO: 47214 - DNA, 20 bp, Human coronavirus 229E
ttcgcgttagcaatgacacc

SEQ ID NO: 47215 - DNA, 20 bp, Human coronavirus 229E
gcgttagcaatgacaccttt

SEQ ID NO: 47216 - DNA, 20 bp, Human coronavirus 229E
gcaatgacacctttcttaat

SEQ ID NO: 47217 - DNA, 20 bp, Human coronavirus 229E
cttaatggaattacgtacac

SEQ ID NO: 47218 - DNA, 20 bp, Human coronavirus 229E
ttaatggaattacgtacaca

SEQ ID NO: 47219 - DNA, 20 bp, Human coronavirus 229E
gtgcagatggttctataatt

SEQ ID NO: 47220 - DNA, 20 bp, Human coronavirus 229E
tgcagatggttctataattg

SEQ ID NO: 47221 - DNA, 20 bp, Human coronavirus 229E
tataattgctgttcaaccac

SEQ ID NO: 47222 - DNA, 20 bp, Human coronavirus 229E
ctgttcaaccacgtaatgtt

SEQ ID NO: 47223 - DNA, 20 bp, Human coronavirus 229E
aaccacgtaatgtttcatat

SEQ ID NO: 47224 - DNA, 20 bp, Human coronavirus 229E
tgacaagaaagcgtttacac

SEQ ID NO: 47225 - DNA, 20 bp, Human coronavirus 229E
gacaagaaagcgtttacact

SEQ ID NO: 47226 - DNA, 20 bp, Human coronavirus 229E
acaagaaagcgtttacactt

SEQ ID NO: 47227 - DNA, 20 bp, Human coronavirus 229E
acacttgctaatgttagtag

SEQ ID NO: 47228 - DNA, 20 bp, Human coronavirus 229E
cacttgctaatgttagtagt

SEQ ID NO: 47229 - DNA, 20 bp, Human coronavirus 229E
aggaggtctaacatcagccg

SEQ ID NO: 47230 - DNA, 20 bp, Human coronavirus 229E
ggaggtctaacatcagccgt

SEQ ID NO: 47231 - DNA, 20 bp, Human coronavirus 229E
caataccattttcattagca

SEQ ID NO: 47232 - DNA, 20 bp, Human coronavirus 229E
aataccattttcattagcaa

SEQ ID NO: 47233 - DNA, 20 bp, Human coronavirus 229E
tcattagcaattcaggcacg

SEQ ID NO: 47234 - DNA, 20 bp, Human coronavirus 229E
aggctgatcaacaagtagat

SEQ ID NO: 47235 - DNA, 20 bp, Human coronavirus 229E
ctggtagattggctgctttg

SEQ ID NO: 47236 - DNA, 20 bp, Human coronavirus 229E
gctgctttgaatgtattcgt

SEQ ID NO: 47237 - DNA, 20 bp, Human coronavirus 229E
gaatgtattcgtttctcata

SEQ ID NO: 47238 - DNA, 20 bp, Human coronavirus 229E
aatgtattcgtttctcatac

SEQ ID NO: 47239 - DNA, 20 bp, Human coronavirus 229E
tgtgttgcgacaacctaatc

SEQ ID NO: 47240 - DNA, 20 bp, Human coronavirus 229E
cgacaacctaatcttgctct

SEQ ID NO: 47241 - DNA, 20 bp, Human coronavirus 229E
ctctttacaaagaaggcaat

SEQ ID NO: 47242 - DNA, 20 bp, Human coronavirus 229E
acaaagaaggcaattattat

SEQ ID NO: 47243 - DNA, 20 bp, Human coronavirus 229E
caaagaaggcaattattata

SEQ ID NO: 47244 - DNA, 20 bp, Human coronavirus 229E
cagacctagttgtcgaacag

SEQ ID NO: 47245 - DNA, 20 bp, Human coronavirus 229E
tcgaacagtacaaccagact

SEQ ID NO: 47246 - DNA, 20 bp, Human coronavirus 229E
tgaatttgaccagtgaaatt

SEQ ID NO: 47247 - DNA, 20 bp, Human coronavirus 229E
gaatttgaccagtgaaatta

SEQ ID NO: 47248 - DNA, 20 bp, Human coronavirus 229E
aatttgaccagtgaaattag

SEQ ID NO: 47249 - DNA, 20 bp, Human coronavirus 229E
catcttctattagaggttgt

SEQ ID NO: 47250 - DNA, 20 bp, Human coronavirus 229E
tattagaggttgttgtgaat

SEQ ID NO: 47251 - DNA, 20 bp, Human coronavirus 229E
gaggttgttgtgaatcaact

SEQ ID NO: 47252 - DNA, 20 bp, Human coronavirus 229E
ttgtgaatcaactaaacttc

SEQ ID NO: 47253 - DNA, 20 bp, Human coronavirus 229E
tgaatcaactaaacttcctt

SEQ ID NO: 47254 - DNA, 20 bp, Human coronavirus 229E
ctgtattggtctcaagcata

SEQ ID NO: 47255 - DNA, 20 bp, Human coronavirus 229E
gtctcaagcatatatttacg

SEQ ID NO: 47256 - DNA, 20 bp, Human coronavirus 229E
acgcaactttgattgctgta

SEQ ID NO: 47257 - DNA, 20 bp, Human coronavirus 229E
cgcaactttgattgctgtaa

SEQ ID NO: 47258 - DNA, 20 bp, Human coronavirus 229E
gattgctgtaattttgcttg

SEQ ID NO: 47259 - DNA, 20 bp, Human coronavirus 229E
ggttgttaatgtactactct

SEQ ID NO: 47260 - DNA, 20 bp, Human coronavirus 229E
gttgttaatgtactactctg

SEQ ID NO: 47261 - DNA, 20 bp, Human coronavirus 229E
ttaatgtactactctggtgt

SEQ ID NO: 47262 - DNA, 20 bp, Human coronavirus 229E
atgtactactctggtgtgtg

SEQ ID NO: 47263 - DNA, 20 bp, Human coronavirus 229E
tagtgatactactagtgtgt

SEQ ID NO: 47264 - DNA, 20 bp, Human coronavirus 229E
tttggccactcgtacttgct

SEQ ID NO: 47265 - DNA, 20 bp, Human coronavirus 229E
ggccactcgtacttgctttg

SEQ ID NO: 47266 - DNA, 20 bp, Human coronavirus 229E
gccactcgtacttgctttgt

SEQ ID NO: 47267 - DNA, 20 bp, Human coronavirus 229E
ctttgtcaatctttgacacc

SEQ ID NO: 47268 - DNA, 20 bp, Human coronavirus 229E
gtcaatctttgacacctggg

SEQ ID NO: 47269 - DNA, 20 bp, Human coronavirus 229E
acaaaatagcacaggctggg

SEQ ID NO: 47270 - DNA, 20 bp, Human coronavirus 229E
tctacgtacgagtaaaacac

SEQ ID NO: 47271 - DNA, 20 bp, Human coronavirus 229E
ctacgtacgagtaaaacacg

SEQ ID NO: 47272 - DNA, 20 bp, Human coronavirus 229E
tacgtacgagtaaaacacgg

SEQ ID NO: 47273 - DNA, 20 bp, Human coronavirus 229E
ttctgcagtgagctctccca

SEQ ID NO: 47274 - DNA, 20 bp, Human coronavirus 229E
taggctattggaatgttcaa

SEQ ID NO: 47275 - DNA, 20 bp, Human coronavirus 229E
gaatgttcaaaaacgtttca

SEQ ID NO: 47276 - DNA, 20 bp, Human coronavirus 229E
aaaaacgtttcagaactaga

SEQ ID NO: 47277 - DNA, 20 bp, Human coronavirus 229E
cagaactagaaagggcaaac

SEQ ID NO: 47278 - DNA, 20 bp, Human coronavirus 229E
agaactagaaagggcaaacg

SEQ ID NO: 47279 - DNA, 20 bp, Human coronavirus 229E
ctgcggctcttaaatcttta

SEQ ID NO: 47280 - DNA, 20 bp, Human coronavirus 229E
aatctttaggttttgacaag

SEQ ID NO: 47281 - DNA, 20 bp, Human coronavirus 229E
aggttttgacaagcctcagg

SEQ ID NO: 47282 - DNA, 20 bp, Human coronavirus 229E
ggttttgacaagcctcagga

SEQ ID NO: 47283 - DNA, 20 bp, Human coronavirus 229E
tgacaagcctcaggaaaaag

SEQ ID NO: 47284 - DNA, 20 bp, Human coronavirus 229E
tggccccagagaccttgacc

SEQ ID NO: 47285 - DNA, 20 bp, Human coronavirus 229E
ggccccagagaccttgacca

SEQ ID NO: 47286 - DNA, 20 bp, Human coronavirus 229E
gccccagagaccttgaccac

SEQ ID NO: 47287 - DNA, 20 bp, Human coronavirus 229E
accacaactttggaagtgca

SEQ ID NO: 47288 - DNA, 20 bp, Human coronavirus 229E
ggaagtgcaggtgttgtggc

SEQ ID NO: 47289 - DNA, 20 bp, Human coronavirus 229E
ttaaccctagtgcactagaa

SEQ ID NO: 47290 - DNA, 20 bp, Human coronavirus 229E
accctagtgcactagaattc

SEQ ID NO: 47291 - DNA, 20 bp, Human coronavirus 229E
aacccatctcaaacttcacc

SEQ ID NO: 47292 - DNA, 20 bp, Human coronavirus 229E
acctgcaactgctgaaccag

SEQ ID NO: 47293 - DNA, 20 bp, Human coronavirus 229E
ctattgaaactgacataatt

SEQ ID NO: 47294 - DNA, 20 bp, Human coronavirus 229E
ctttggcttgacaaggatct

SEQ ID NO: 47295 - DNA, 20 bp, Human coronavirus 229E
ggcttgacaaggatctagtc

SEQ ID NO: 47296 - DNA, 20 bp, Human coronavirus 229E
gcttgacaaggatctagtct

SEQ ID NO: 47297 - DNA, 20 bp, Human coronavirus 229E
acaaggatctagtcttatac

SEQ ID NO: 47298 - DNA, 20 bp, Human coronavirus 229E
tacacaatggtaagccagtg

SEQ ID NO: 47299 - DNA, 20 bp, Human papillomavirus type 108
attgtgactcattgcatgtc

SEQ ID NO: 47300 - DNA, 20 bp, Human papillomavirus type 108
ttgtgactcattgcatgtcc

SEQ ID NO: 47301 - DNA, 20 bp, Human papillomavirus type 108
tgactcattgcatgtccatt

SEQ ID NO: 47302 - DNA, 20 bp, Human papillomavirus type 108
catgtccatttgccacacct

SEQ ID NO: 47303 - DNA, 20 bp, Human papillomavirus type 108
gccacacctggcttttagta

SEQ ID NO: 47304 - DNA, 20 bp, Human papillomavirus type 108
gaagcattatttgaagaaag

SEQ ID NO: 47305 - DNA, 20 bp, Human papillomavirus type 108
tttgaagaaagcgatgggac

SEQ ID NO: 47306 - DNA, 20 bp, Human papillomavirus type 108
gaagaaagcgatgggacaga

SEQ ID NO: 47307 - DNA, 20 bp, Human papillomavirus type 108
aagaaagcgatgggacagat

SEQ ID NO: 47308 - DNA, 20 bp, Human papillomavirus type 108
ctgatttaattaataacatt

SEQ ID NO: 47309 - DNA, 20 bp, Human papillomavirus type 108
ggacatgaagctgaagattc

SEQ ID NO: 47310 - DNA, 20 bp, Human papillomavirus type 108
taatgaaagggtggaaaagg

SEQ ID NO: 47311 - DNA, 20 bp, Human papillomavirus type 108
tgcgttgcactcacagactg

SEQ ID NO: 47312 - DNA, 20 bp, Human papillomavirus type 108
gcgttgcactcacagactgc

SEQ ID NO: 47313 - DNA, 20 bp, Human papillomavirus type 108
cgttgcactcacagactgct

SEQ ID NO: 47314 - DNA, 20 bp, Human papillomavirus type 108
cagtagcattatttttctat

SEQ ID NO: 47315 - DNA, 20 bp, Human papillomavirus type 108
tttttctatagacatagctt

SEQ ID NO: 47316 - DNA, 20 bp, Human papillomavirus type 108
ttctatagacatagcttatc

SEQ ID NO: 47317 - DNA, 20 bp, Human papillomavirus type 108
tctatagacatagcttatca

SEQ ID NO: 47318 - DNA, 20 bp, Human papillomavirus type 108
ctatagacatagcttatcaa

SEQ ID NO: 47319 - DNA, 20 bp, Human papillomavirus type 108
cccatcaacagtttccccac

SEQ ID NO: 47320 - DNA, 20 bp, Human papillomavirus type 108
ccccacacttttttatccat

SEQ ID NO: 47321 - DNA, 20 bp, Human papillomavirus type 108
cccacacttttttatccatt

SEQ ID NO: 47322 - DNA, 20 bp, Human papillomavirus type 108
tttatccattgtcctataga

SEQ ID NO: 47323 - DNA, 20 bp, Human papillomavirus type 108
ttatccattgtcctatagac

SEQ ID NO: 47324 - DNA, 20 bp, Human papillomavirus type 108
aaaaaaggtggtgcacaagt

SEQ ID NO: 47325 - DNA, 20 bp, Human papillomavirus type 108
aaaaaggtggtgcacaagtg

SEQ ID NO: 47326 - DNA, 20 bp, Human papillomavirus type 108
ccactttgtatatggcatgg

SEQ ID NO: 47327 - DNA, 20 bp, Human papillomavirus type 108
cactttgtatatggcatggc

SEQ ID NO: 47328 - DNA, 20 bp, Human papillomavirus type 108
gtatatggcatggctttatt

SEQ ID NO: 47329 - DNA, 20 bp, Human papillomavirus type 108
tgacacttctgcatcagtgg

SEQ ID NO: 47330 - DNA, 20 bp, Human papillomavirus type 108
tgcatcagtgggatcaagac

SEQ ID NO: 47331 - DNA, 20 bp, Human papillomavirus type 108
caaggttacaagctgaggct

SEQ ID NO: 47332 - DNA, 20 bp, Human papillomavirus type 108
caagctgaggctagggatcc

SEQ ID NO: 47333 - DNA, 20 bp, Human papillomavirus type 108
ctattaatatggggggatcc

SEQ ID NO: 47334 - DNA, 20 bp, Human papillomavirus type 108
gctgataaaattttaaaatg

SEQ ID NO: 47335 - DNA, 20 bp, Human papillomavirus type 108
taaaatggattgccagtgtg

SEQ ID NO: 47336 - DNA, 20 bp, Human papillomavirus type 108
aaaatggattgccagtgtgg

SEQ ID NO: 47337 - DNA, 20 bp, Human papillomavirus type 108
aaatggattgccagtgtggt

SEQ ID NO: 47338 - DNA, 20 bp, Human papillomavirus type 108
ccagtgtggtgtactttggg

SEQ ID NO: 47339 - DNA, 20 bp, Human papillomavirus type 108
atcccattggcccccctgac

SEQ ID NO: 47340 - DNA, 20 bp, Human papillomavirus type 108
gcccccctgacattgttcct

SEQ ID NO: 47341 - DNA, 20 bp, Human papillomavirus type 108
ttcctgtagatgtggtaacc

SEQ ID NO: 47342 - DNA, 20 bp, Human papillomavirus type 108
ctgtagatgtggtaaccccc

SEQ ID NO: 47343 - DNA, 20 bp, Human papillomavirus type 108
cattgttcccctggaggtac

SEQ ID NO: 47344 - DNA, 20 bp, Human papillomavirus type 108
aatagtagtagacatgccac

SEQ ID NO: 47345 - DNA, 20 bp, Human papillomavirus type 108
ctgtgtatggtcatcctaca

SEQ ID NO: 47346 - DNA, 20 bp, Human papillomavirus type 108
tgtgtatggtcatcctacag

SEQ ID NO: 47347 - DNA, 20 bp, Human papillomavirus type 108
ttattggtgcagctgccacc

SEQ ID NO: 47348 - DNA, 20 bp, Human papillomavirus type 108
ttggtgcagctgccaccgat

SEQ ID NO: 47349 - DNA, 20 bp, Human papillomavirus type 108
gaactagaaatgtaaacttc

SEQ ID NO: 47350 - DNA, 20 bp, Human papillomavirus type 108
ttaaaccgcccacgtcaggc

SEQ ID NO: 47351 - DNA, 20 bp, Human papillomavirus type 108
aaccgcccacgtcaggcggt

SEQ ID NO: 47352 - DNA, 20 bp, Human papillomavirus type 108
caatttgaaaatcccgcctt

SEQ ID NO: 47353 - DNA, 20 bp, Human papillomavirus type 108
aatttgaaaatcccgccttt

SEQ ID NO: 47354 - DNA, 20 bp, Human papillomavirus type 108
acctcgtcccgcctacgctt

SEQ ID NO: 47355 - DNA, 20 bp, Human papillomavirus type 108
cctcgtcccgcctacgcttt

SEQ ID NO: 47356 - DNA, 20 bp, Human papillomavirus type 108
gcaggccttcagggtgtttc

SEQ ID NO: 47357 - DNA, 20 bp, Human papillomavirus type 108
caggccttcagggtgtttct

SEQ ID NO: 47358 - DNA, 20 bp, Human papillomavirus type 108
agggtgtttctatatctcct

SEQ ID NO: 47359 - DNA, 20 bp, Human papillomavirus type 108
tttaattgtttttcagatgt

SEQ ID NO: 47360 - DNA, 20 bp, Human papillomavirus type 108
aattgtttttcagatgtcac

SEQ ID NO: 47361 - DNA, 20 bp, Human papillomavirus type 108
attgtttttcagatgtcact

SEQ ID NO: 47362 - DNA, 20 bp, Human papillomavirus type 108
tttttcagatgtcactgtgg

SEQ ID NO: 47363 - DNA, 20 bp, Human papillomavirus type 108
ttcagatgtcactgtggtta

SEQ ID NO: 47364 - DNA, 20 bp, Human papillomavirus type 108
agggttttgcttccagatcc

SEQ ID NO: 47365 - DNA, 20 bp, Human papillomavirus type 108
gggttttgcttccagatcct

SEQ ID NO: 47366 - DNA, 20 bp, Human papillomavirus type 108
tgcttccagatcctaacaag

SEQ ID NO: 47367 - DNA, 20 bp, Human papillomavirus type 108
gcttccagatcctaacaagc

SEQ ID NO: 47368 - DNA, 20 bp, Human papillomavirus type 108
cttccagatcctaacaagct

SEQ ID NO: 47369 - DNA, 20 bp, Human papillomavirus type 108
atgcccgtcacttttttaca

SEQ ID NO: 47370 - DNA, 20 bp, Human papillomavirus type 108
tgcccgtcacttttttacac

SEQ ID NO: 47371 - DNA, 20 bp, Human papillomavirus type 108
tttacacgggatggcactat

SEQ ID NO: 47372 - DNA, 20 bp, Human papillomavirus type 108
ttacacgggatggcactatt

SEQ ID NO: 47373 - DNA, 20 bp, Human papillomavirus type 108
tacacgggatggcactattg

SEQ ID NO: 47374 - DNA, 20 bp, Human papillomavirus type 108
ttgatgattggcagttaggc

SEQ ID NO: 47375 - DNA, 20 bp, Human papillomavirus type 108
atgattggcagttaggcttt

SEQ ID NO: 47376 - DNA, 20 bp, Human papillomavirus type 108
gcagttaggctttgtacccc

SEQ ID NO: 47377 - DNA, 20 bp, Human papillomavirus type 108
ggctttgtaccccctcctgc

SEQ ID NO: 47378 - DNA, 20 bp, Human papillomavirus type 108
gtaccccctcctgcaccatc

SEQ ID NO: 47379 - DNA, 20 bp, Human gammaherpesvirus 4
ctgcgactcctgggcgccac

SEQ ID NO: 47380 - DNA, 20 bp, Human gammaherpesvirus 4
gcgtggagatgggcaggcag

SEQ ID NO: 47381 - DNA, 20 bp, Human gammaherpesvirus 4
ggcttcgaggtgcatagaag

SEQ ID NO: 47382 - DNA, 20 bp, Human gammaherpesvirus 4
gcttcgaggtgcatagaagc

SEQ ID NO: 47383 - DNA, 20 bp, Human gammaherpesvirus 4
gaggtgcatagaagccggcc

SEQ ID NO: 47384 - DNA, 20 bp, Human gammaherpesvirus 4
cgagttgccctggctctcgc

SEQ ID NO: 47385 - DNA, 20 bp, Human gammaherpesvirus 4
ccctggctctcgctggagtc

SEQ ID NO: 47386 - DNA, 20 bp, Human gammaherpesvirus 4
cttcccacggtggggtgtga

SEQ ID NO: 47387 - DNA, 20 bp, Human gammaherpesvirus 4
ccacggtggggtgtgacagg

SEQ ID NO: 47388 - DNA, 20 bp, Human gammaherpesvirus 4
tgaggcatgactccagcgag

SEQ ID NO: 47389 - DNA, 20 bp, Human gammaherpesvirus 4
gatccggaagacgtcttgct

SEQ ID NO: 47390 - DNA, 20 bp, Human gammaherpesvirus 4
cggatccaagattggggcac

SEQ ID NO: 47391 - DNA, 20 bp, Human gammaherpesvirus 4
gggcacatgctgcgttcagc

SEQ ID NO: 47392 - DNA, 20 bp, Human gammaherpesvirus 4
agcagcgcctcagccattgc

SEQ ID NO: 47393 - DNA, 20 bp, Human gammaherpesvirus 4
gcagagcaccccggcctggt

SEQ ID NO: 47394 - DNA, 20 bp, Human gammaherpesvirus 4
cagagcaccccggcctggtg

SEQ ID NO: 47395 - DNA, 20 bp, Human gammaherpesvirus 4
gaggtgcagcacggcccaga

SEQ ID NO: 47396 - DNA, 20 bp, Human gammaherpesvirus 4
aggtgcagcacggcccagag

SEQ ID NO: 47397 - DNA, 20 bp, Human gammaherpesvirus 4
cgccagtcgctgcgcctgct

SEQ ID NO: 47398 - DNA, 20 bp, Human gammaherpesvirus 4
ccagcagcaggcgcagcgac

SEQ ID NO: 47399 - DNA, 20 bp, Human gammaherpesvirus 4
gatctggaccttgctcgccc

SEQ ID NO: 47400 - DNA, 20 bp, Human gammaherpesvirus 4
ttgggtgcaaggctcgtgcc

SEQ ID NO: 47401 - DNA, 20 bp, Human gammaherpesvirus 4
ggtgcaaggctcgtgcctgg

SEQ ID NO: 47402 - DNA, 20 bp, Human gammaherpesvirus 4
gtaaattgcaggcccaggca

SEQ ID NO: 47403 - DNA, 20 bp, Human gammaherpesvirus 4
caggcccaggcacgagcctt

SEQ ID NO: 47404 - DNA, 20 bp, Human gammaherpesvirus 4
cacccaacaaggcaggacgc

SEQ ID NO: 47405 - DNA, 20 bp, Human gammaherpesvirus 4
tgtgacagggtttcctggac

SEQ ID NO: 47406 - DNA, 20 bp, Human gammaherpesvirus 4
cctggacacccagtcttagt

SEQ ID NO: 47407 - DNA, 20 bp, Human gammaherpesvirus 4
ctggacacccagtcttagtt

SEQ ID NO: 47408 - DNA, 20 bp, Human gammaherpesvirus 4
gttcaggtagacacccagtt

SEQ ID NO: 47409 - DNA, 20 bp, Human gammaherpesvirus 4
aggtagacacccagttatgc

SEQ ID NO: 47410 - DNA, 20 bp, Human gammaherpesvirus 4
ggcctggctccccatagact

SEQ ID NO: 47411 - DNA, 20 bp, Human gammaherpesvirus 4
tgcccccctggcggcccagc

SEQ ID NO: 47412 - DNA, 20 bp, Human gammaherpesvirus 4
gcccccctggcggcccagcc

SEQ ID NO: 47413 - DNA, 20 bp, Human gammaherpesvirus 4
cccccctggcggcccagccc

SEQ ID NO: 47414 - DNA, 20 bp, Human gammaherpesvirus 4
catgggagtctatggggagc

SEQ ID NO: 47415 - DNA, 20 bp, Human gammaherpesvirus 4
gcagaaaaaattaaagtcca

SEQ ID NO: 47416 - DNA, 20 bp, Human gammaherpesvirus 4
aagtccacttacctctggcc

SEQ ID NO: 47417 - DNA, 20 bp, Human gammaherpesvirus 4
cctctggcccgataccgggg

SEQ ID NO: 47418 - DNA, 20 bp, Human gammaherpesvirus 4
gtccagggccttcacttcgg

SEQ ID NO: 47419 - DNA, 20 bp, Human gammaherpesvirus 4
acttcggtctcccctaggct

SEQ ID NO: 47420 - DNA, 20 bp, Human gammaherpesvirus 4
ccacctcctcttcttgctgg

SEQ ID NO: 47421 - DNA, 20 bp, Human gammaherpesvirus 4
ttgctggacgaggacccttc

SEQ ID NO: 47422 - DNA, 20 bp, Human gammaherpesvirus 4
ctggacgaggacccttctac

SEQ ID NO: 47423 - DNA, 20 bp, Human gammaherpesvirus 4
tacggactcgtctgggttct

SEQ ID NO: 47424 - DNA, 20 bp, Human gammaherpesvirus 4
ttggccccctctggtaggac

SEQ ID NO: 47425 - DNA, 20 bp, Human gammaherpesvirus 4
gggccctcaagtccagcccc

SEQ ID NO: 47426 - DNA, 20 bp, Human gammaherpesvirus 4
ggccctcaagtccagcccca

SEQ ID NO: 47427 - DNA, 20 bp, Human gammaherpesvirus 4
agggcccaaagaggcccctc

SEQ ID NO: 47428 - DNA, 20 bp, Human gammaherpesvirus 4
tacggactcgtctgggttct

SEQ ID NO: 47429 - DNA, 20 bp, Human gammaherpesvirus 4
ttggccccctctggtaggac

SEQ ID NO: 47430 - DNA, 20 bp, Human gammaherpesvirus 4
gccccctctggtaggactgg

SEQ ID NO: 47431 - DNA, 20 bp, Human gammaherpesvirus 4
ttaggagctgtccgagggga

SEQ ID NO: 47432 - DNA, 20 bp, Human gammaherpesvirus 4
ggagctgtccgaggggaccc

SEQ ID NO: 47433 - DNA, 20 bp, Human gammaherpesvirus 4
gcgttgctaggccaccttct

SEQ ID NO: 47434 - DNA, 20 bp, Human gammaherpesvirus 4
ctaggccaccttctcagtcc

SEQ ID NO: 47435 - DNA, 20 bp, Human gammaherpesvirus 4
tcagtccagcgcgtttacgt

SEQ ID NO: 47436 - DNA, 20 bp, Human gammaherpesvirus 4
acgtaagccagacagcagcc

SEQ ID NO: 47437 - DNA, 20 bp, Human gammaherpesvirus 4
cgtaagccagacagcagcca

SEQ ID NO: 47438 - DNA, 20 bp, Human gammaherpesvirus 4
ttggccccctctggtaggac

SEQ ID NO: 47439 - DNA, 20 bp, Human gammaherpesvirus 4
gccccctctggtaggactgg

SEQ ID NO: 47440 - DNA, 20 bp, Human gammaherpesvirus 4
ttaggagctgtccgagggga

SEQ ID NO: 47441 - DNA, 20 bp, Human gammaherpesvirus 4
ggagctgtccgaggggaccc

SEQ ID NO: 47442 - DNA, 20 bp, Human gammaherpesvirus 4
gccagcaacttatagcatgg

SEQ ID NO: 47443 - DNA, 20 bp, Human gammaherpesvirus 4
ccagcaacttatagcatggt

SEQ ID NO: 47444 - DNA, 20 bp, Human gammaherpesvirus 4
tagcatggtaggcagctcaa

SEQ ID NO: 47445 - DNA, 20 bp, Human gammaherpesvirus 4
ctgcccagcctactctccac

SEQ ID NO: 47446 - DNA, 20 bp, Human gammaherpesvirus 4
agctgcctaccatgctataa

SEQ ID NO: 47447 - DNA, 20 bp, Human gammaherpesvirus 4
ggacttggataacttttcag

SEQ ID NO: 47448 - DNA, 20 bp, Human gammaherpesvirus 4
gataacttttcagaagctga

SEQ ID NO: 47449 - DNA, 20 bp, Human gammaherpesvirus 4
tcagaagctgagaccgaaga

SEQ ID NO: 47450 - DNA, 20 bp, Human gammaherpesvirus 4
cagaagctgagaccgaagac

SEQ ID NO: 47451 - DNA, 20 bp, Human gammaherpesvirus 4
agaagctgagaccgaagacg

SEQ ID NO: 47452 - DNA, 20 bp, Human gammaherpesvirus 4
tccgctgggccaggtcacag

SEQ ID NO: 47453 - DNA, 20 bp, Human gammaherpesvirus 4
gcccgtccctcttgtccctt

SEQ ID NO: 47454 - DNA, 20 bp, Human gammaherpesvirus 4
tccctttcagtggtcaccgg

SEQ ID NO: 47455 - DNA, 20 bp, Human gammaherpesvirus 4
gccatcaagaattatgtccc

SEQ ID NO: 47456 - DNA, 20 bp, Human gammaherpesvirus 4
ccatcaagaattatgtcccg

SEQ ID NO: 47457 - DNA, 20 bp, Human gammaherpesvirus 4
tgtcccgggcctggactcac

SEQ ID NO: 47458 - DNA, 20 bp, Human gammaherpesvirus 4
tcccgctgggcccagtctca

SEQ ID NO: 47459 - DNA, 20 bp, Human gammaherpesvirus 4
gtgagtccaggcccgggaca

SEQ ID NO: 47460 - DNA, 20 bp, Human gammaherpesvirus 4
gggagcttcccggagaccgg

SEQ ID NO: 47461 - DNA, 20 bp, Human gammaherpesvirus 4
ccggagaccggtctgggctc

SEQ ID NO: 47462 - DNA, 20 bp, Human gammaherpesvirus 4
cggccccgaaatagggcctt

SEQ ID NO: 47463 - DNA, 20 bp, Human gammaherpesvirus 4
ggccccgaaatagggccttg

SEQ ID NO: 47464 - DNA, 20 bp, Human gammaherpesvirus 4
atggcaaggccctatttcgg

SEQ ID NO: 47465 - DNA, 20 bp, Human gammaherpesvirus 4
gggggaaaccggagaacagc

SEQ ID NO: 47466 - DNA, 20 bp, Human gammaherpesvirus 4
cgtggattcgggggaagctg

SEQ ID NO: 47467 - DNA, 20 bp, Human gammaherpesvirus 4
gggggaagctggtatccaac

SEQ ID NO: 47468 - DNA, 20 bp, Human gammaherpesvirus 4
gataccagcttcccccgaat

SEQ ID NO: 47469 - DNA, 20 bp, Human gammaherpesvirus 4
ccccgaatccacgcaacgtc

SEQ ID NO: 47470 - DNA, 20 bp, Human gammaherpesvirus 4
agctggcgcgggtcggtgtg

SEQ ID NO: 47471 - DNA, 20 bp, Human gammaherpesvirus 4
gggcctcggctggctcccag

SEQ ID NO: 47472 - DNA, 20 bp, Human gammaherpesvirus 4
tccagtctgcgacggtctcc

SEQ ID NO: 47473 - DNA, 20 bp, Human gammaherpesvirus 4
ccagtctgcgacggtctcct

SEQ ID NO: 47474 - DNA, 20 bp, Human gammaherpesvirus 4
cagtctgcgacggtctcctt

SEQ ID NO: 47475 - DNA, 20 bp, Human gammaherpesvirus 4
ccccccgcgacccgcttggg

SEQ ID NO: 47476 - DNA, 20 bp, Human gammaherpesvirus 4
gggtccaacgtggccagagc

SEQ ID NO: 47477 - DNA, 20 bp, Human gammaherpesvirus 4
cgcggcctccattctctccg

SEQ ID NO: 47478 - DNA, 20 bp, Human gammaherpesvirus 4
tctccgccgcaccaccatcg

SEQ ID NO: 47479 - DNA, 20 bp, Human gammaherpesvirus 4
tccctgatgtccgccgtaca

SEQ ID NO: 47480 - DNA, 20 bp, Human gammaherpesvirus 4
ttggaccggacggccacgtt

SEQ ID NO: 47481 - DNA, 20 bp, Human gammaherpesvirus 4
gaccggacggccacgttgtg

SEQ ID NO: 47482 - DNA, 20 bp, Human gammaherpesvirus 4
tggacaaaggggggcactga

SEQ ID NO: 47483 - DNA, 20 bp, Human gammaherpesvirus 4
gtccacaacgtggccgtccg

SEQ ID NO: 47484 - DNA, 20 bp, Human gammaherpesvirus 4
gggcggcctccgccagggat

SEQ ID NO: 47485 - DNA, 20 bp, Human gammaherpesvirus 4
cagctttcgtcgtccaggac

SEQ ID NO: 47486 - DNA, 20 bp, Human gammaherpesvirus 4
cgtcgtccaggaccaagggg

SEQ ID NO: 47487 - DNA, 20 bp, Human gammaherpesvirus 4
gtcgtccaggaccaagggga

SEQ ID NO: 47488 - DNA, 20 bp, Human gammaherpesvirus 4
catctacaggggcccgcacg

SEQ ID NO: 47489 - DNA, 20 bp, Human gammaherpesvirus 4
gggcagcagccctcctttgg

SEQ ID NO: 47490 - DNA, 20 bp, Human gammaherpesvirus 4
ggggatgatgcatctggggg

SEQ ID NO: 47491 - DNA, 20 bp, Human gammaherpesvirus 4
gggatgatgcatctgggggt

SEQ ID NO: 47492 - DNA, 20 bp, Human gammaherpesvirus 4
tttggcggggaggatgcgga

SEQ ID NO: 47493 - DNA, 20 bp, Human gammaherpesvirus 4
ttggcggggaggatgcggaa

SEQ ID NO: 47494 - DNA, 20 bp, Human gammaherpesvirus 4
tggcggggaggatgcggaat

SEQ ID NO: 47495 - DNA, 20 bp, Human gammaherpesvirus 4
ggcggggaggatgcggaatg

SEQ ID NO: 47496 - DNA, 20 bp, Human gammaherpesvirus 4
gcggggaggatgcggaatgg

SEQ ID NO: 47497 - DNA, 20 bp, Human gammaherpesvirus 4
agcgtctggaggtccgtgga

SEQ ID NO: 47498 - DNA, 20 bp, Human gammaherpesvirus 4
gcgtctggaggtccgtggag

SEQ ID NO: 47499 - DNA, 20 bp, Human gammaherpesvirus 4
tccttcaccgctaccaccgc

SEQ ID NO: 47500 - DNA, 20 bp, Human gammaherpesvirus 4
ccttcaccgctaccaccgcc

SEQ ID NO: 47501 - DNA, 20 bp, Human gammaherpesvirus 4
cttcaccgctaccaccgcct

SEQ ID NO: 47502 - DNA, 20 bp, Human gammaherpesvirus 4
accctgagatacagcacgac

SEQ ID NO: 47503 - DNA, 20 bp, Human gammaherpesvirus 4
ggcctggccacccgccgctt

SEQ ID NO: 47504 - DNA, 20 bp, Human gammaherpesvirus 4
ctggtctcgggtgagaccct

SEQ ID NO: 47505 - DNA, 20 bp, Human gammaherpesvirus 4
tggtctcgggtgagaccctc

SEQ ID NO: 47506 - DNA, 20 bp, Human gammaherpesvirus 4
ggaactcgatgaaggcggcc

SEQ ID NO: 47507 - DNA, 20 bp, Human gammaherpesvirus 4
gaactcgatgaaggcggccg

SEQ ID NO: 47508 - DNA, 20 bp, Human gammaherpesvirus 4
ttcccggccgccttcatcga

SEQ ID NO: 47509 - DNA, 20 bp, Human gammaherpesvirus 4
ccggccgccttcatcgagtt

SEQ ID NO: 47510 - DNA, 20 bp, Human gammaherpesvirus 4
atcgagttccaaatctggcc

SEQ ID NO: 47511 - DNA, 20 bp, Human gammaherpesvirus 4
acggggctctttgtccccga

SEQ ID NO: 47512 - DNA, 20 bp, Human gammaherpesvirus 4
cggggctctttgtccccgag

SEQ ID NO: 47513 - DNA, 20 bp, Human gammaherpesvirus 4
gtccccgagctcttcttcaa

SEQ ID NO: 47514 - DNA, 20 bp, Human gammaherpesvirus 4
tccccgagctcttcttcaag

SEQ ID NO: 47515 - DNA, 20 bp, Human gammaherpesvirus 4
ttcaagctttttagggacac

SEQ ID NO: 47516 - DNA, 20 bp, Human gammaherpesvirus 4
tctatcgtcaactgcgccgt

SEQ ID NO: 47517 - DNA, 20 bp, Human gammaherpesvirus 4
atccttttgaaggaggcctg

SEQ ID NO: 47518 - DNA, 20 bp, Human gammaherpesvirus 4
tgaaggaggcctgcaacgcc

SEQ ID NO: 47519 - DNA, 20 bp, Human gammaherpesvirus 4
gaaggaggcctgcaacgccc

SEQ ID NO: 47520 - DNA, 20 bp, Human gammaherpesvirus 4
aaggaggcctgcaacgccca

SEQ ID NO: 47521 - DNA, 20 bp, Human gammaherpesvirus 4
accaggcagcgcgggaggca

SEQ ID NO: 47522 - DNA, 20 bp, Human gammaherpesvirus 4
gccagattgcaggtggccac

SEQ ID NO: 47523 - DNA, 20 bp, Human gammaherpesvirus 4
caggtggccacagacttcct

SEQ ID NO: 47524 - DNA, 20 bp, Human gammaherpesvirus 4
aggcccacgttgtctgctcg

SEQ ID NO: 47525 - DNA, 20 bp, Human gammaherpesvirus 4
tctgctcggtagcagcggac

SEQ ID NO: 47526 - DNA, 20 bp, Human gammaherpesvirus 4
ggagagtccggcaaggccag

SEQ ID NO: 47527 - DNA, 20 bp, Human gammaherpesvirus 4
ccagccactccagcaacacc

SEQ ID NO: 47528 - DNA, 20 bp, Human gammaherpesvirus 4
ctggagtggctgggaatggc

SEQ ID NO: 47529 - DNA, 20 bp, Human gammaherpesvirus 4
ccggactctcccaagtaggg

SEQ ID NO: 47530 - DNA, 20 bp, Human gammaherpesvirus 4
gtcttctggcacagctgttg

SEQ ID NO: 47531 - DNA, 20 bp, Human gammaherpesvirus 4
tcttctggcacagctgttgc

SEQ ID NO: 47532 - DNA, 20 bp, Human gammaherpesvirus 4
tggcacagctgttgccaggg

SEQ ID NO: 47533 - DNA, 20 bp, Human gammaherpesvirus 4
ccagggtgctcatgagcgag

SEQ ID NO: 47534 - DNA, 20 bp, Human gammaherpesvirus 4
tcagctgctggacacgcaca

SEQ ID NO: 47535 - DNA, 20 bp, Human gammaherpesvirus 4
cagctgctggacacgcacat

SEQ ID NO: 47536 - DNA, 20 bp, Human gammaherpesvirus 4
agctgctggacacgcacatg

SEQ ID NO: 47537 - DNA, 20 bp, Human gammaherpesvirus 4
cctggctgagcatgtgcgtg

SEQ ID NO: 47538 - DNA, 20 bp, Human gammaherpesvirus 4
cacgagagaacccgccacgt

SEQ ID NO: 47539 - DNA, 20 bp, Human gammaherpesvirus 4
tggcacaaacaaaacaggcg

SEQ ID NO: 47540 - DNA, 20 bp, Human gammaherpesvirus 4
cgcctgttttgtttgtgcca

SEQ ID NO: 47541 - DNA, 20 bp, Human gammaherpesvirus 4
tgtttgtgccacaacgcctc

SEQ ID NO: 47542 - DNA, 20 bp, Human gammaherpesvirus 4
gtttgtgccacaacgcctcg

SEQ ID NO: 47543 - DNA, 20 bp, Human gammaherpesvirus 4
atgggacccttgtcctcctc

SEQ ID NO: 47544 - DNA, 20 bp, Human gammaherpesvirus 4
tcctcctccatctggggggt

SEQ ID NO: 47545 - DNA, 20 bp, Human gammaherpesvirus 4
tgagctccgatggacgcagc

SEQ ID NO: 47546 - DNA, 20 bp, Human gammaherpesvirus 4
gagctccgatggacgcagcg

SEQ ID NO: 47547 - DNA, 20 bp, Human gammaherpesvirus 4
agctccgatggacgcagcgt

SEQ ID NO: 47548 - DNA, 20 bp, Human gammaherpesvirus 4
tggtcttcatcgggcgcagc

SEQ ID NO: 47549 - DNA, 20 bp, Human gammaherpesvirus 4
cagtcccacaaacgcggcgg

SEQ ID NO: 47550 - DNA, 20 bp, Human gammaherpesvirus 4
cctgactgaagcccaggacc

SEQ ID NO: 47551 - DNA, 20 bp, Human gammaherpesvirus 4
tactcctacacatgtaatgc

SEQ ID NO: 47552 - DNA, 20 bp, Human gammaherpesvirus 4
catgtgtaggagtagaactg

SEQ ID NO: 47553 - DNA, 20 bp, Human gammaherpesvirus 4
agtcagggaagccgccgccg

SEQ ID NO: 47554 - DNA, 20 bp, Human gammaherpesvirus 4
aacaagtttgtgaacacgct

SEQ ID NO: 47555 - DNA, 20 bp, Human gammaherpesvirus 4
acaagtttgtgaacacgctg

SEQ ID NO: 47556 - DNA, 20 bp, Human gammaherpesvirus 4
gtgaacacgctgctgacgga

SEQ ID NO: 47557 - DNA, 20 bp, Human gammaherpesvirus 4
tgaacacgctgctgacggat

SEQ ID NO: 47558 - DNA, 20 bp, Human gammaherpesvirus 4
gatggggatatttaaaaggg

SEQ ID NO: 47559 - DNA, 20 bp, Human gammaherpesvirus 4
catgaacaacacggcatggc

SEQ ID NO: 47560 - DNA, 20 bp, Human gammaherpesvirus 4
ccccctgtatctccagggga

SEQ ID NO: 47561 - DNA, 20 bp, Human gammaherpesvirus 4
atcccctggagatacagggg

SEQ ID NO: 47562 - DNA, 20 bp, Human gammaherpesvirus 4
ttcatgtaatgggtatgcca

SEQ ID NO: 47563 - DNA, 20 bp, Human gammaherpesvirus 4
gaggcccgcaccttggacgc

SEQ ID NO: 47564 - DNA, 20 bp, Human gammaherpesvirus 4
gacgccaaatccaccccgtt

SEQ ID NO: 47565 - DNA, 20 bp, Human gammaherpesvirus 4
tcccagtcagatgtccgtgc

SEQ ID NO: 47566 - DNA, 20 bp, Human gammaherpesvirus 4
ggcgtccaaggtgcgggcct

SEQ ID NO: 47567 - DNA, 20 bp, Human gammaherpesvirus 4
gcgtccaaggtgcgggcctc

SEQ ID NO: 47568 - DNA, 20 bp, Human gammaherpesvirus 4
tgagtcagggggggacaatg

SEQ ID NO: 47569 - DNA, 20 bp, Human gammaherpesvirus 4
gagtcagggggggacaatgt

SEQ ID NO: 47570 - DNA, 20 bp, Human gammaherpesvirus 4
agtcagggggggacaatgtc

SEQ ID NO: 47571 - DNA, 20 bp, Human gammaherpesvirus 4
tgactgctacgctaggatgt

SEQ ID NO: 47572 - DNA, 20 bp, Human gammaherpesvirus 4
tccccccctgactcaaaact

SEQ ID NO: 47573 - DNA, 20 bp, Human gammaherpesvirus 4
agccaagtcagactccagat

SEQ ID NO: 47574 - DNA, 20 bp, Human gammaherpesvirus 4
ccggtggccgggactgtttc

SEQ ID NO: 47575 - DNA, 20 bp, Human gammaherpesvirus 4
cggtggccgggactgtttcg

SEQ ID NO: 47576 - DNA, 20 bp, Human gammaherpesvirus 4
cgttgggtcatctggagtct

SEQ ID NO: 47577 - DNA, 20 bp, Human gammaherpesvirus 4
gttgggtcatctggagtctg

SEQ ID NO: 47578 - DNA, 20 bp, Human gammaherpesvirus 4
gggcaccgggcttcaggggc

SEQ ID NO: 47579 - DNA, 20 bp, Human gammaherpesvirus 4
ggcaccgggcttcaggggca

SEQ ID NO: 47580 - DNA, 20 bp, Human gammaherpesvirus 4
aggggcatggtcgggctcgg

SEQ ID NO: 47581 - DNA, 20 bp, Human gammaherpesvirus 4
cgagttcatctgtaaaagca

SEQ ID NO: 47582 - DNA, 20 bp, Human gammaherpesvirus 4
gagttcatctgtaaaagcat

SEQ ID NO: 47583 - DNA, 20 bp, Human gammaherpesvirus 4
ttttggttcctgaacatctg

SEQ ID NO: 47584 - DNA, 20 bp, Human gammaherpesvirus 4
tggttcctgaacatctggct

SEQ ID NO: 47585 - DNA, 20 bp, Human gammaherpesvirus 4
ggttcctgaacatctggctg

SEQ ID NO: 47586 - DNA, 20 bp, Human gammaherpesvirus 4
gttcctgaacatctggctgg

SEQ ID NO: 47587 - DNA, 20 bp, Human gammaherpesvirus 4
ctgaacatctggctggggca

SEQ ID NO: 47588 - DNA, 20 bp, Human gammaherpesvirus 4
ggccagcccggggggacctc

SEQ ID NO: 47589 - DNA, 20 bp, Human gammaherpesvirus 4
ccccagtttgccccatcgtt

SEQ ID NO: 47590 - DNA, 20 bp, Human gammaherpesvirus 4
gccccatcgtttccctgacg

SEQ ID NO: 47591 - DNA, 20 bp, Human gammaherpesvirus 4
ccccatcgtttccctgacgg

SEQ ID NO: 47592 - DNA, 20 bp, Human gammaherpesvirus 4
ccctgacggcctcaggggcc

SEQ ID NO: 47593 - DNA, 20 bp, Human gammaherpesvirus 4
agattcagacgagtctgact

SEQ ID NO: 47594 - DNA, 20 bp, Human gammaherpesvirus 4
agacgagtctgactacagcg

SEQ ID NO: 47595 - DNA, 20 bp, Human gammaherpesvirus 4
aagatcgtgaggcctgagag

SEQ ID NO: 47596 - DNA, 20 bp, Human gammaherpesvirus 4
cttcatcctcgtcgctctcg

SEQ ID NO: 47597 - DNA, 20 bp, Human gammaherpesvirus 4
atcctcgtcgctctcgctgt

SEQ ID NO: 47598 - DNA, 20 bp, Human gammaherpesvirus 4
cccgttttcacagagagaat

SEQ ID NO: 47599 - DNA, 20 bp, Human gammaherpesvirus 4
tcacagagagaatgtcctcc

SEQ ID NO: 47600 - DNA, 20 bp, Human gammaherpesvirus 4
cacagagagaatgtcctccg

SEQ ID NO: 47601 - DNA, 20 bp, Human gammaherpesvirus 4
acagagagaatgtcctccgt

SEQ ID NO: 47602 - DNA, 20 bp, Human gammaherpesvirus 4
tctctgtgaaaacggggaat

SEQ ID NO: 47603 - DNA, 20 bp, Human gammaherpesvirus 4
gtggtccatagctgcccctg

SEQ ID NO: 47604 - DNA, 20 bp, Human gammaherpesvirus 4
gaggtcctgagagacatgca

SEQ ID NO: 47605 - DNA, 20 bp, Human gammaherpesvirus 4
aggtcctgagagacatgcac

SEQ ID NO: 47606 - DNA, 20 bp, Human gammaherpesvirus 4
atgtggcggctcttgaaccc

SEQ ID NO: 47607 - DNA, 20 bp, Human gammaherpesvirus 4
tgtggcggctcttgaaccca

SEQ ID NO: 47608 - DNA, 20 bp, Human gammaherpesvirus 4
aacccaaaggcgctatagac

SEQ ID NO: 47609 - DNA, 20 bp, Human gammaherpesvirus 4
gggttcaagagccgccacat

SEQ ID NO: 47610 - DNA, 20 bp, Human gammaherpesvirus 4
ggttcaagagccgccacata

SEQ ID NO: 47611 - DNA, 20 bp, Human gammaherpesvirus 4
cccccggccatctttgccgg

SEQ ID NO: 47612 - DNA, 20 bp, Human gammaherpesvirus 4
gccggaacggtgaccttcga

SEQ ID NO: 47613 - DNA, 20 bp, Human gammaherpesvirus 4
ccggaacggtgaccttcgac

SEQ ID NO: 47614 - DNA, 20 bp, Human gammaherpesvirus 4
cggcaaagatggccgggggg

SEQ ID NO: 47615 - DNA, 20 bp, Human gammaherpesvirus 4
ctttttgcatggtcaggctc

SEQ ID NO: 47616 - DNA, 20 bp, Human gammaherpesvirus 4
ttgcatggtcaggctccgtg

SEQ ID NO: 47617 - DNA, 20 bp, Human gammaherpesvirus 4
tgcatggtcaggctccgtgt

SEQ ID NO: 47618 - DNA, 20 bp, Human gammaherpesvirus 4
gcatggtcaggctccgtgtc

SEQ ID NO: 47619 - DNA, 20 bp, Human gammaherpesvirus 4
catggtcaggctccgtgtcc

SEQ ID NO: 47620 - DNA, 20 bp, Human gammaherpesvirus 4
acatccgagacctccgggcc

SEQ ID NO: 47621 - DNA, 20 bp, Human gammaherpesvirus 4
tgcggctacgtcctcgtgag

SEQ ID NO: 47622 - DNA, 20 bp, Human gammaherpesvirus 4
gcggctacgtcctcgtgagt

SEQ ID NO: 47623 - DNA, 20 bp, Human gammaherpesvirus 4
cggctacgtcctcgtgagtc

SEQ ID NO: 47624 - DNA, 20 bp, Human gammaherpesvirus 4
acgtgggcccggaggtctcg

SEQ ID NO: 47625 - DNA, 20 bp, Human gammaherpesvirus 4
gcgtagcaggaggcatagat

SEQ ID NO: 47626 - DNA, 20 bp, Human gammaherpesvirus 4
acaagccaggactcgaatcc

SEQ ID NO: 47627 - DNA, 20 bp, Human gammaherpesvirus 4
gagtcctggcttgtcaactc

SEQ ID NO: 47628 - DNA, 20 bp, Human gammaherpesvirus 4
tcaactcttggagtatggcc

SEQ ID NO: 47629 - DNA, 20 bp, Human gammaherpesvirus 4
gagtatggccgggggcgggc

SEQ ID NO: 47630 - DNA, 20 bp, Human gammaherpesvirus 4
ttggtcccgcccatcatccc

SEQ ID NO: 47631 - DNA, 20 bp, Human gammaherpesvirus 4
gtcccgcccatcatcccccg

SEQ ID NO: 47632 - DNA, 20 bp, Human gammaherpesvirus 4
ggcagaccacctgtgctgga

SEQ ID NO: 47633 - DNA, 20 bp, Human gammaherpesvirus 4
atggcttcgggtccgagatg

SEQ ID NO: 47634 - DNA, 20 bp, Human gammaherpesvirus 4
gcaaattatttaaaaggtga

SEQ ID NO: 47635 - DNA, 20 bp, Human gammaherpesvirus 4
caaattatttaaaaggtgaa

SEQ ID NO: 47636 - DNA, 20 bp, Human gammaherpesvirus 4
tttaaaaggtgaatgctcaa

SEQ ID NO: 47637 - DNA, 20 bp, Human gammaherpesvirus 4
aaaaggtgaatgctcaactg

SEQ ID NO: 47638 - DNA, 20 bp, Human gammaherpesvirus 4
aaaggtgaatgctcaactga

SEQ ID NO: 47639 - DNA, 20 bp, Human gammaherpesvirus 4
caggagccagccgcggtgct

SEQ ID NO: 47640 - DNA, 20 bp, Human gammaherpesvirus 4
cggatgacagagtccggcag

SEQ ID NO: 47641 - DNA, 20 bp, Human gammaherpesvirus 4
ccgtggcggtgctggtgaca

SEQ ID NO: 47642 - DNA, 20 bp, Human gammaherpesvirus 4
agcaccgcggctggctcctg

SEQ ID NO: 47643 - DNA, 20 bp, Human gammaherpesvirus 4
ggggctgcaaattgcaaaaa

SEQ ID NO: 47644 - DNA, 20 bp, Human gammaherpesvirus 4
gggctgcaaattgcaaaaag

SEQ ID NO: 47645 - DNA, 20 bp, Human gammaherpesvirus 4
caaaaagtagagcgggtcgg

SEQ ID NO: 47646 - DNA, 20 bp, Human gammaherpesvirus 4
gggtaggggattttgtgggt

SEQ ID NO: 47647 - DNA, 20 bp, Human gammaherpesvirus 4
gaccgatccgacccgctcta

SEQ ID NO: 47648 - DNA, 20 bp, Human gammaherpesvirus 4
tgccccgtgccgcagcgtaa

SEQ ID NO: 47649 - DNA, 20 bp, Human gammaherpesvirus 4
gccccgtgccgcagcgtaaa

SEQ ID NO: 47650 - DNA, 20 bp, Human gammaherpesvirus 4
ccccgtgccgcagcgtaaac

SEQ ID NO: 47651 - DNA, 20 bp, Human gammaherpesvirus 4
acgctgcggcacggggcaaa

SEQ ID NO: 47652 - DNA, 20 bp, Human gammaherpesvirus 4
cgctgcggcacggggcaaaa

SEQ ID NO: 47653 - DNA, 20 bp, Human gammaherpesvirus 4
agggtgtcaacccggcagag

SEQ ID NO: 47654 - DNA, 20 bp, Human gammaherpesvirus 4
atggcatcgtcacgcacagt

SEQ ID NO: 47655 - DNA, 20 bp, Human gammaherpesvirus 4
tcggtgacaataaacacccc

SEQ ID NO: 47656 - DNA, 20 bp, Human gammaherpesvirus 4
attgtcaccgacaacgttct

SEQ ID NO: 47657 - DNA, 20 bp, Human gammaherpesvirus 4
ttgtcaccgacaacgttctg

SEQ ID NO: 47658 - DNA, 20 bp, Human gammaherpesvirus 4
tcaccgacaacgttctgcgc

SEQ ID NO: 47659 - DNA, 20 bp, Human gammaherpesvirus 4
tgcgccagctcttgaccttc

SEQ ID NO: 47660 - DNA, 20 bp, Human gammaherpesvirus 4
ggacacccccgggggcccgg

SEQ ID NO: 47661 - DNA, 20 bp, Human gammaherpesvirus 4
gacacccccgggggcccggc

SEQ ID NO: 47662 - DNA, 20 bp, Human gammaherpesvirus 4
aggtgccccatcttcccttc

SEQ ID NO: 47663 - DNA, 20 bp, Human gammaherpesvirus 4
ggtgccccatcttcccttcg

SEQ ID NO: 47664 - DNA, 20 bp, Human gammaherpesvirus 4
ccttcgcaggagggccacca

SEQ ID NO: 47665 - DNA, 20 bp, Human gammaherpesvirus 4
attcacggggccgtgcacct

SEQ ID NO: 47666 - DNA, 20 bp, Human gammaherpesvirus 4
acggggccgtgcacctgcca

SEQ ID NO: 47667 - DNA, 20 bp, Human gammaherpesvirus 4
tcttccacaccatccacagc

SEQ ID NO: 47668 - DNA, 20 bp, Human gammaherpesvirus 4
cacaccatccacagccccac

SEQ ID NO: 47669 - DNA, 20 bp, Human gammaherpesvirus 4
gatgccaccccctatgcccg

SEQ ID NO: 47670 - DNA, 20 bp, Human gammaherpesvirus 4
gggctccggaggtgggggct

SEQ ID NO: 47671 - DNA, 20 bp, Human gammaherpesvirus 4
ttcaggatggacttggtggg

SEQ ID NO: 47672 - DNA, 20 bp, Human gammaherpesvirus 4
tcaggatggacttggtggga

SEQ ID NO: 47673 - DNA, 20 bp, Human gammaherpesvirus 4
caggatggacttggtgggag

SEQ ID NO: 47674 - DNA, 20 bp, Human gammaherpesvirus 4
ttgccaaaacaacgtgtgct

SEQ ID NO: 47675 - DNA, 20 bp, Human gammaherpesvirus 4
ccaaaacaacgtgtgctctt

SEQ ID NO: 47676 - DNA, 20 bp, Human gammaherpesvirus 4
cttcatacaggcccgcaatt

SEQ ID NO: 47677 - DNA, 20 bp, Human gammaherpesvirus 4
ttcatacaggcccgcaattt

SEQ ID NO: 47678 - DNA, 20 bp, Human gammaherpesvirus 4
atacaggcccgcaatttcca

SEQ ID NO: 47679 - DNA, 20 bp, Human gammaherpesvirus 4
gaaacggccgcctggtccag

SEQ ID NO: 47680 - DNA, 20 bp, Human gammaherpesvirus 4
aaacggccgcctggtccagc

SEQ ID NO: 47681 - DNA, 20 bp, Human gammaherpesvirus 4
cctcctggggggccatgctc

SEQ ID NO: 47682 - DNA, 20 bp, Human gammaherpesvirus 4
caaatgctgtggatgggttt

SEQ ID NO: 47683 - DNA, 20 bp, Human gammaherpesvirus 4
aaatgctgtggatgggtttc

SEQ ID NO: 47684 - DNA, 20 bp, Human gammaherpesvirus 4
gtatagggcaaggttgggcc

SEQ ID NO: 47685 - DNA, 20 bp, Human gammaherpesvirus 4
ggcccctgggtagtcacgtt

SEQ ID NO: 47686 - DNA, 20 bp, Human gammaherpesvirus 4
cggctgaacgtgactaccca

SEQ ID NO: 47687 - DNA, 20 bp, Human gammaherpesvirus 4
ccctataccaactgctgtcc

SEQ ID NO: 47688 - DNA, 20 bp, Human gammaherpesvirus 4
taggccgagagaagcacaga

SEQ ID NO: 47689 - DNA, 20 bp, Human gammaherpesvirus 4
gggtagccgacggtggctaa

SEQ ID NO: 47690 - DNA, 20 bp, Human gammaherpesvirus 4
gccaccgtcggctaccccaa

SEQ ID NO: 47691 - DNA, 20 bp, Human gammaherpesvirus 4
acagtggcctcattggaggc

SEQ ID NO: 47692 - DNA, 20 bp, Human gammaherpesvirus 4
cagtggcctcattggaggcg

SEQ ID NO: 47693 - DNA, 20 bp, Human gammaherpesvirus 4
agaacattcatcacactccc

SEQ ID NO: 47694 - DNA, 20 bp, Human gammaherpesvirus 4
atcacactcccacttagccg

SEQ ID NO: 47695 - DNA, 20 bp, Human gammaherpesvirus 4
gccgcttcagctgggcagca

SEQ ID NO: 47696 - DNA, 20 bp, Human gammaherpesvirus 4
agctgggcagcatgcttgga

SEQ ID NO: 47697 - DNA, 20 bp, Human gammaherpesvirus 4
gataacttactaaactcgcg

SEQ ID NO: 47698 - DNA, 20 bp, Human gammaherpesvirus 4
cggcctcccgctctgccagc

SEQ ID NO: 47699 - DNA, 20 bp, Human gammaherpesvirus 4
ggcctcccgctctgccagct

SEQ ID NO: 47700 - DNA, 20 bp, Human gammaherpesvirus 4
gggggacacgcgcagtgagt

SEQ ID NO: 47701 - DNA, 20 bp, Human gammaherpesvirus 4
gggaggacactgccaaggtt

SEQ ID NO: 47702 - DNA, 20 bp, Human gammaherpesvirus 4
aagagcagatttccgtcagc

SEQ ID NO: 47703 - DNA, 20 bp, Human gammaherpesvirus 4
ccgtcagccagggtgacctg

SEQ ID NO: 47704 - DNA, 20 bp, Human gammaherpesvirus 4
cgtcagccagggtgacctgg

SEQ ID NO: 47705 - DNA, 20 bp, Human gammaherpesvirus 4
gactgcgcagggcgccggac

SEQ ID NO: 47706 - DNA, 20 bp, Human gammaherpesvirus 4
gtggagcgcccggacgcccc

SEQ ID NO: 47707 - DNA, 20 bp, Human gammaherpesvirus 4
acctggatcccctcaccgtc

SEQ ID NO: 47708 - DNA, 20 bp, Human gammaherpesvirus 4
ttcagagggagctggctctt

SEQ ID NO: 47709 - DNA, 20 bp, Human gammaherpesvirus 4
agagggagctggctcttgac

SEQ ID NO: 47710 - DNA, 20 bp, Human gammaherpesvirus 4
acggtgaggggatccaggtg

SEQ ID NO: 47711 - DNA, 20 bp, Human gammaherpesvirus 4
ggagcagggcccagtgcacc

SEQ ID NO: 47712 - DNA, 20 bp, Human gammaherpesvirus 4
gggcgccagggatcgattgg

SEQ ID NO: 47713 - DNA, 20 bp, Human gammaherpesvirus 4
gaaaagggcccagggtcact

SEQ ID NO: 47714 - DNA, 20 bp, Human gammaherpesvirus 4
tccaatcgatccctggcgcc

SEQ ID NO: 47715 - DNA, 20 bp, Human gammaherpesvirus 4
ccaatcgatccctggcgccc

SEQ ID NO: 47716 - DNA, 20 bp, Human gammaherpesvirus 4
agaaatgggggcgtgtgctg

SEQ ID NO: 47717 - DNA, 20 bp, Human gammaherpesvirus 4
gaaatgggggcgtgtgctgc

SEQ ID NO: 47718 - DNA, 20 bp, Human gammaherpesvirus 4
cctgctggcgcagcacacgc

SEQ ID NO: 47719 - DNA, 20 bp, Human gammaherpesvirus 4
ctaaagtcatacgcccgtat

SEQ ID NO: 47720 - DNA, 20 bp, Human gammaherpesvirus 4
taaagtcatacgcccgtatt

SEQ ID NO: 47721 - DNA, 20 bp, Human gammaherpesvirus 4
gctccactggggatctttgc

SEQ ID NO: 47722 - DNA, 20 bp, Human gammaherpesvirus 4
gccagccttcatactagatt

SEQ ID NO: 47723 - DNA, 20 bp, Human gammaherpesvirus 4
ccagccttcatactagattc

SEQ ID NO: 47724 - DNA, 20 bp, Human gammaherpesvirus 4
atactagattcagcgatccc

SEQ ID NO: 47725 - DNA, 20 bp, Human gammaherpesvirus 4
agcgatcccccggttgggaa

SEQ ID NO: 47726 - DNA, 20 bp, Human gammaherpesvirus 4
tggtagacggccaggtgagg

SEQ ID NO: 47727 - DNA, 20 bp, Human gammaherpesvirus 4
taggctgagagcttgcggct

SEQ ID NO: 47728 - DNA, 20 bp, Human gammaherpesvirus 4
cggctgagctccgttgaaaa

SEQ ID NO: 47729 - DNA, 20 bp, Human gammaherpesvirus 4
aaaagcagagctcccccatg

SEQ ID NO: 47730 - DNA, 20 bp, Human gammaherpesvirus 4
tcaacggagctcagccgcaa

SEQ ID NO: 47731 - DNA, 20 bp, Human gammaherpesvirus 4
tttgtaatcagcatcaggca

SEQ ID NO: 47732 - DNA, 20 bp, Human gammaherpesvirus 4
gtaatcagcatcaggcagga

SEQ ID NO: 47733 - DNA, 20 bp, Human gammaherpesvirus 4
taatcagcatcaggcaggag

SEQ ID NO: 47734 - DNA, 20 bp, Human gammaherpesvirus 4
tcggcctccagggagatggg

SEQ ID NO: 47735 - DNA, 20 bp, Human gammaherpesvirus 4
gtggcccccatctccctgga

SEQ ID NO: 47736 - DNA, 20 bp, Human gammaherpesvirus 4
cacgtgcacttgatggccag

SEQ ID NO: 47737 - DNA, 20 bp, Human gammaherpesvirus 4
atggccagctgctgcttgtc

SEQ ID NO: 47738 - DNA, 20 bp, Human gammaherpesvirus 4
tcgaggatggtcctttggcg

SEQ ID NO: 47739 - DNA, 20 bp, Human gammaherpesvirus 4
ggcgcggatcctcgcaggcc

SEQ ID NO: 47740 - DNA, 20 bp, Human gammaherpesvirus 4
gcgcggatcctcgcaggccg

SEQ ID NO: 47741 - DNA, 20 bp, Human gammaherpesvirus 4
tagtctgagaggctgagctt

SEQ ID NO: 47742 - DNA, 20 bp, Human gammaherpesvirus 4
tcccggcacacggcgtacat

SEQ ID NO: 47743 - DNA, 20 bp, Human gammaherpesvirus 4
cgcatgcgggccagctccca

SEQ ID NO: 47744 - DNA, 20 bp, Human gammaherpesvirus 4
ccgtggttgggcagaaccat

SEQ ID NO: 47745 - DNA, 20 bp, Human gammaherpesvirus 4
ggcagaaccatcagctcgcc

SEQ ID NO: 47746 - DNA, 20 bp, Human gammaherpesvirus 4
tgcccaaccacggcaaccct

SEQ ID NO: 47747 - DNA, 20 bp, Human gammaherpesvirus 4
aacatcttgacaaagtcacg

SEQ ID NO: 47748 - DNA, 20 bp, Human gammaherpesvirus 4
acaaagtcacgcgggccatg

SEQ ID NO: 47749 - DNA, 20 bp, Human gammaherpesvirus 4
tctagctttccttcagcgtc

SEQ ID NO: 47750 - DNA, 20 bp, Human gammaherpesvirus 4
ccttcagcgtctatgcccag

SEQ ID NO: 47751 - DNA, 20 bp, Human gammaherpesvirus 4
cttcagcgtctatgcccagc

SEQ ID NO: 47752 - DNA, 20 bp, Human gammaherpesvirus 4
tatcggtgtaacgcagccac

SEQ ID NO: 47753 - DNA, 20 bp, Human gammaherpesvirus 4
gccgactgtgagggtccaga

SEQ ID NO: 47754 - DNA, 20 bp, Human gammaherpesvirus 4
ccgactgtgagggtccagag

SEQ ID NO: 47755 - DNA, 20 bp, Human gammaherpesvirus 4
caccgatataatgccagcct

SEQ ID NO: 47756 - DNA, 20 bp, Human gammaherpesvirus 4
taccccctggccacctaccc

SEQ ID NO: 47757 - DNA, 20 bp, Human gammaherpesvirus 4
accccctggccacctaccct

SEQ ID NO: 47758 - DNA, 20 bp, Human gammaherpesvirus 4
ccccctggccacctaccctc

SEQ ID NO: 47759 - DNA, 20 bp, Human gammaherpesvirus 4
gggaggtggccacactgggg

SEQ ID NO: 47760 - DNA, 20 bp, Human gammaherpesvirus 4
ctatccttcctcagggaggc

SEQ ID NO: 47761 - DNA, 20 bp, Human gammaherpesvirus 4
ctcagggaggccttgatgag

SEQ ID NO: 47762 - DNA, 20 bp, Human gammaherpesvirus 4
atgagccggcagaggaccag

SEQ ID NO: 47763 - DNA, 20 bp, Human gammaherpesvirus 4
gccagccctggtcctctgcc

SEQ ID NO: 47764 - DNA, 20 bp, Human gammaherpesvirus 4
ccagccctggtcctctgccg

SEQ ID NO: 47765 - DNA, 20 bp, Human gammaherpesvirus 4
aggggggttcaggtgaggca

SEQ ID NO: 47766 - DNA, 20 bp, Human gammaherpesvirus 4
ggggggttcaggtgaggcaa

SEQ ID NO: 47767 - DNA, 20 bp, Human gammaherpesvirus 4
aggtgaggcaaggctgtggg

SEQ ID NO: 47768 - DNA, 20 bp, Human gammaherpesvirus 4
gtcacccgccgacccttagc

SEQ ID NO: 47769 - DNA, 20 bp, Human gammaherpesvirus 4
gccctcttagccgcctcacc

SEQ ID NO: 47770 - DNA, 20 bp, Human papillomavirus type 156
cagcaaatccgtcttttctt

SEQ ID NO: 47771 - DNA, 20 bp, Human papillomavirus type 156
agcaaatccgtcttttcttc

SEQ ID NO: 47772 - DNA, 20 bp, Human papillomavirus type 156
tcttcttccatggctgactc

SEQ ID NO: 47773 - DNA, 20 bp, Human papillomavirus type 156
cttcttccatggctgactcg

SEQ ID NO: 47774 - DNA, 20 bp, Human papillomavirus type 156
ttcttccatggctgactcgt

SEQ ID NO: 47775 - DNA, 20 bp, Human papillomavirus type 156
aattagatttgcatgcttta

SEQ ID NO: 47776 - DNA, 20 bp, Human papillomavirus type 156
gatttgcatgctttagtact

SEQ ID NO: 47777 - DNA, 20 bp, Human papillomavirus type 156
gcatgctttagtactacctg

SEQ ID NO: 47778 - DNA, 20 bp, Human papillomavirus type 156
catgctttagtactacctgc

SEQ ID NO: 47779 - DNA, 20 bp, Human papillomavirus type 156
agtactacctgcaaatttac

SEQ ID NO: 47780 - DNA, 20 bp, Human papillomavirus type 156
cagccctaaaacgaaagtta

SEQ ID NO: 47781 - DNA, 20 bp, Human papillomavirus type 156
gttggttctccagtacaaac

SEQ ID NO: 47782 - DNA, 20 bp, Human papillomavirus type 156
gttctccagtacaaacggta

SEQ ID NO: 47783 - DNA, 20 bp, Human papillomavirus type 156
tccagtacaaacggtagcag

SEQ ID NO: 47784 - DNA, 20 bp, Human papillomavirus type 156
agcccgcgattggaagctgt

SEQ ID NO: 47785 - DNA, 20 bp, Human papillomavirus type 156
gcaatcctcctagaactcgt

SEQ ID NO: 47786 - DNA, 20 bp, Human papillomavirus type 156
caatcctcctagaactcgta

SEQ ID NO: 47787 - DNA, 20 bp, Human papillomavirus type 156
ccattttcttctttcaaaaa

SEQ ID NO: 47788 - DNA, 20 bp, Human papillomavirus type 156
tcttctttcaaaaaggtttt

SEQ ID NO: 47789 - DNA, 20 bp, Human papillomavirus type 156
cttctttcaaaaaggttttt

SEQ ID NO: 47790 - DNA, 20 bp, Human papillomavirus type 156
ttttagaaaactcgccacac

SEQ ID NO: 47791 - DNA, 20 bp, Human papillomavirus type 156
tttagaaaactcgccacaca

SEQ ID NO: 47792 - DNA, 20 bp, Human papillomavirus type 156
ttagaaaactcgccacacaa

SEQ ID NO: 47793 - DNA, 20 bp, Human papillomavirus type 156
tagaaaactcgccacacaaa

SEQ ID NO: 47794 - DNA, 20 bp, Human papillomavirus type 156
agaaaactcgccacacaaat

SEQ ID NO: 47795 - DNA, 20 bp, Human papillomavirus type 156
ttttgttgtgtttgcatcag

SEQ ID NO: 47796 - DNA, 20 bp, Human papillomavirus type 156
tgttgtgtttgcatcagatg

SEQ ID NO: 47797 - DNA, 20 bp, Human papillomavirus type 156
gttgtgtttgcatcagatgc

SEQ ID NO: 47798 - DNA, 20 bp, Human papillomavirus type 156
ttgtgtttgcatcagatgcc

SEQ ID NO: 47799 - DNA, 20 bp, Human papillomavirus type 156
tgtttgcatcagatgcccaa

SEQ ID NO: 47800 - DNA, 20 bp, Human papillomavirus type 156
gacctagcacaagacctaca

SEQ ID NO: 47801 - DNA, 20 bp, Human papillomavirus type 156
tcggttcctttagatcctat

SEQ ID NO: 47802 - DNA, 20 bp, Human papillomavirus type 156
cggttcctttagatcctata

SEQ ID NO: 47803 - DNA, 20 bp, Human papillomavirus type 156
ggttcctttagatcctatag

SEQ ID NO: 47804 - DNA, 20 bp, Human papillomavirus type 156
ctttagatcctataggatca

SEQ ID NO: 47805 - DNA, 20 bp, Human papillomavirus type 156
atcccagggcacaatttgaa

SEQ ID NO: 47806 - DNA, 20 bp, Human papillomavirus type 156
gaaattgaagaaccccaacc

SEQ ID NO: 47807 - DNA, 20 bp, Human papillomavirus type 156
aaattgaagaaccccaacct

SEQ ID NO: 47808 - DNA, 20 bp, Human papillomavirus type 156
aagaaccccaacctacaagt

SEQ ID NO: 47809 - DNA, 20 bp, Human papillomavirus type 156
agacagagttcagagagtac

SEQ ID NO: 47810 - DNA, 20 bp, Human papillomavirus type 156
ctaaagtgctgaatacggat

SEQ ID NO: 47811 - DNA, 20 bp, Human papillomavirus type 156
tattaaaagaactggatatt

SEQ ID NO: 47812 - DNA, 20 bp, Human papillomavirus type 156
attaaaagaactggatatta

SEQ ID NO: 47813 - DNA, 20 bp, Human papillomavirus type 156
ttaaaagaactggatattac

SEQ ID NO: 47814 - DNA, 20 bp, Human papillomavirus type 156
aaagaactggatattacttt

SEQ ID NO: 47815 - DNA, 20 bp, Human papillomavirus type 156
tttcacacttacattcaaga

SEQ ID NO: 47816 - DNA, 20 bp, Human papillomavirus type 156
cacacttacattcaagatgg

SEQ ID NO: 47817 - DNA, 20 bp, Human papillomavirus type 156
acacttacattcaagatggt

SEQ ID NO: 47818 - DNA, 20 bp, Human papillomavirus type 156
cattcaagatggtgatatgt

SEQ ID NO: 47819 - DNA, 20 bp, Human papillomavirus type 156
aagatggtgatatgtgtgaa

SEQ ID NO: 47820 - DNA, 20 bp, Human papillomavirus type 156
cagatatattttatcattag

SEQ ID NO: 47821 - DNA, 20 bp, Human papillomavirus type 156
tatcattagctacaaaatgt

SEQ ID NO: 47822 - DNA, 20 bp, Human papillomavirus type 156
atcattagctacaaaatgtc

SEQ ID NO: 47823 - DNA, 20 bp, Human papillomavirus type 156
tcattagctacaaaatgtcc

SEQ ID NO: 47824 - DNA, 20 bp, Human papillomavirus type 156
gctacaaaatgtcctgcaga

SEQ ID NO: 47825 - DNA, 20 bp, Human papillomavirus type 156
atcattttgagagtataaag

SEQ ID NO: 47826 - DNA, 20 bp, Human papillomavirus type 156
tgagagtataaagccaagcc

SEQ ID NO: 47827 - DNA, 20 bp, Human papillomavirus type 156
gagagtataaagccaagcca

SEQ ID NO: 47828 - DNA, 20 bp, Human papillomavirus type 156
agagtataaagccaagccaa

SEQ ID NO: 47829 - DNA, 20 bp, Human papillomavirus type 156
gcacttatcttctgtcagta

SEQ ID NO: 47830 - DNA, 20 bp, Influenza A virus
cagctgcagatgcagacaca

SEQ ID NO: 47831 - DNA, 20 bp, Influenza A virus
aaccgacactgttgacacag

SEQ ID NO: 47832 - DNA, 20 bp, Influenza A virus
acacagtgctcgagaagaat

SEQ ID NO: 47833 - DNA, 20 bp, Influenza A virus
ttctcgagcactgtgtcaac

SEQ ID NO: 47834 - DNA, 20 bp, Influenza A virus
tcgagcactgtgtcaacagt

SEQ ID NO: 47835 - DNA, 20 bp, Influenza A virus
tagaaacaccaaactctgag

SEQ ID NO: 47836 - DNA, 20 bp, Influenza A virus
tccaggagatttcatcgact

SEQ ID NO: 47837 - DNA, 20 bp, Influenza A virus
catcgactatgaggagctga

SEQ ID NO: 47838 - DNA, 20 bp, Influenza A virus
atcgactatgaggagctgag

SEQ ID NO: 47839 - DNA, 20 bp, Influenza A virus
agctcagtgtcatcattcga

SEQ ID NO: 47840 - DNA, 20 bp, Influenza A virus
ttatgtgaacaagaaaggga

SEQ ID NO: 47841 - DNA, 20 bp, Influenza A virus
tgtgaacaagaaagggaaag

SEQ ID NO: 47842 - DNA, 20 bp, Influenza A virus
tactgtggggtattcatcac

SEQ ID NO: 47843 - DNA, 20 bp, Influenza A virus
atcacccgtctaacagtaag

SEQ ID NO: 47844 - DNA, 20 bp, Influenza A virus
ctgttagacgggtgatgaat

SEQ ID NO: 47845 - DNA, 20 bp, Influenza A virus
gaggcaaatggaaatctaat

SEQ ID NO: 47846 - DNA, 20 bp, Influenza A virus
aggcaaatggaaatctaata

SEQ ID NO: 47847 - DNA, 20 bp, Influenza A virus
cgcactgagtagaggctttg

SEQ ID NO: 47848 - DNA, 20 bp, Influenza A virus
gcactgagtagaggctttgg

SEQ ID NO: 47849 - DNA, 20 bp, Influenza A virus
gggtccggcatcatcacctc

SEQ ID NO: 47850 - DNA, 20 bp, Influenza A virus
cgtccattcaatccagaggt

SEQ ID NO: 47851 - DNA, 20 bp, Influenza A virus
aatccagaggtctatttgga

SEQ ID NO: 47852 - DNA, 20 bp, Influenza A virus
ggagccattgccggttttat

SEQ ID NO: 47853 - DNA, 20 bp, Influenza A virus
gagccattgccggttttatt

SEQ ID NO: 47854 - DNA, 20 bp, Influenza A virus
ccggttttattgaaggggga

SEQ ID NO: 47855 - DNA, 20 bp, Influenza A virus
aacagggaaaaggtagatgg

SEQ ID NO: 47856 - DNA, 20 bp, Influenza A virus
gaatcaatggggatctatca

SEQ ID NO: 47857 - DNA, 20 bp, Influenza A virus
tggcgatctactcaactgtc

SEQ ID NO: 47858 - DNA, 20 bp, Influenza A virus
actggtgcttttggtctccc

SEQ ID NO: 47859 - DNA, 20 bp, Influenza A virus
agtagatcgccagaatctga

SEQ ID NO: 47860 - DNA, 20 bp, Human papillomavirus type 9
aaaacgaccgataacggtaa

SEQ ID NO: 47861 - DNA, 20 bp, Human papillomavirus type 9
gcacgtaggtggttatttga

SEQ ID NO: 47862 - DNA, 20 bp, Human papillomavirus type 9
tttgatcgttgggatgattg

SEQ ID NO: 47863 - DNA, 20 bp, Human papillomavirus type 9
gatcgttgggatgattgtgg

SEQ ID NO: 47864 - DNA, 20 bp, Human papillomavirus type 9
atcgttgggatgattgtggt

SEQ ID NO: 47865 - DNA, 20 bp, Human papillomavirus type 9
acagcttatttggacagagg

SEQ ID NO: 47866 - DNA, 20 bp, Human papillomavirus type 9
cagcttatttggacagagga

SEQ ID NO: 47867 - DNA, 20 bp, Human papillomavirus type 9
tttggacagaggaggatttg

SEQ ID NO: 47868 - DNA, 20 bp, Human papillomavirus type 9
ggacagaggaggatttggtg

SEQ ID NO: 47869 - DNA, 20 bp, Human papillomavirus type 9
gacagaggaggatttggtgt

SEQ ID NO: 47870 - DNA, 20 bp, Human papillomavirus type 9
gctacatgctataagtttga

SEQ ID NO: 47871 - DNA, 20 bp, Human papillomavirus type 9
gagcagttttataaggtcag

SEQ ID NO: 47872 - DNA, 20 bp, Human papillomavirus type 9
agcagttttataaggtcaga

SEQ ID NO: 47873 - DNA, 20 bp, Human papillomavirus type 9
tataaggtcagaaacagctg

SEQ ID NO: 47874 - DNA, 20 bp, Human papillomavirus type 9
ataaggtcagaaacagctgg

SEQ ID NO: 47875 - DNA, 20 bp, Human papillomavirus type 9
gagcgcaacaggaacttttg

SEQ ID NO: 47876 - DNA, 20 bp, Human papillomavirus type 9
tgctgggtgatatacaactg

SEQ ID NO: 47877 - DNA, 20 bp, Human papillomavirus type 9
gctgggtgatatacaactgg

SEQ ID NO: 47878 - DNA, 20 bp, Human papillomavirus type 9
ctgggtgatatacaactggt

SEQ ID NO: 47879 - DNA, 20 bp, Human papillomavirus type 9
gccatgagtgacaataaagg

SEQ ID NO: 47880 - DNA, 20 bp, Human papillomavirus type 9
cagacctaatagatgatgga

SEQ ID NO: 47881 - DNA, 20 bp, Human papillomavirus type 9
agacctaatagatgatggag

SEQ ID NO: 47882 - DNA, 20 bp, Human papillomavirus type 9
tgccagcaagagagtgagga

SEQ ID NO: 47883 - DNA, 20 bp, Human papillomavirus type 9
gccagcaagagagtgaggaa

SEQ ID NO: 47884 - DNA, 20 bp, Human papillomavirus type 9
ccagcaagagagtgaggaaa

SEQ ID NO: 47885 - DNA, 20 bp, Human papillomavirus type 9
ggaattgttaaagatttact

SEQ ID NO: 47886 - DNA, 20 bp, Human papillomavirus type 9
ttaaagatttacttaaacat

SEQ ID NO: 47887 - DNA, 20 bp, Human papillomavirus type 9
aagtaaatctttaacaattc

SEQ ID NO: 47888 - DNA, 20 bp, Human papillomavirus type 9
agtaaatctttaacaattcc

SEQ ID NO: 47889 - DNA, 20 bp, Human papillomavirus type 9
aacaattcccaagcccttag

SEQ ID NO: 47890 - DNA, 20 bp, Human papillomavirus type 9
ttattgcagcattgtgctta

SEQ ID NO: 47891 - DNA, 20 bp, Human papillomavirus type 9
ttgcagcattgtgcttatat

SEQ ID NO: 47892 - DNA, 20 bp, Human papillomavirus type 9
cagcattgtgcttatatttg

SEQ ID NO: 47893 - DNA, 20 bp, Human papillomavirus type 9
tgcttatatttggctacatt

SEQ ID NO: 47894 - DNA, 20 bp, Human papillomavirus type 9
tatttggctacattatatgc

SEQ ID NO: 47895 - DNA, 20 bp, Human papillomavirus type 9
atcaccaatctgcaaatgct

SEQ ID NO: 47896 - DNA, 20 bp, Human papillomavirus type 9
gacttatcgacaatgataca

SEQ ID NO: 47897 - DNA, 20 bp, Human papillomavirus type 9
acttatcgacaatgatacaa

SEQ ID NO: 47898 - DNA, 20 bp, Human papillomavirus type 9
tcgacaatgatacaatttgc

SEQ ID NO: 47899 - DNA, 20 bp, Human papillomavirus type 9
gcctatgatcatgaatattt

SEQ ID NO: 47900 - DNA, 20 bp, Human papillomavirus type 9
ctttcaataacaaatttcca

SEQ ID NO: 47901 - DNA, 20 bp, Human papillomavirus type 9
caataacaaatttccacttg

SEQ ID NO: 47902 - DNA, 20 bp, Human papillomavirus type 9
aataacaaatttccacttga

SEQ ID NO: 47903 - DNA, 20 bp, Human papillomavirus type 9
ccacttgatgctaatcacaa

SEQ ID NO: 47904 - DNA, 20 bp, Human papillomavirus type 9
cacttgatgctaatcacaaa

SEQ ID NO: 47905 - DNA, 20 bp, Human papillomavirus type 9
tgcattatgccaggaaaaat

SEQ ID NO: 47906 - DNA, 20 bp, Human papillomavirus type 9
gcattatgccaggaaaaatg

SEQ ID NO: 47907 - DNA, 20 bp, Human papillomavirus type 9
cattatgccaggaaaaatgg

SEQ ID NO: 47908 - DNA, 20 bp, Human papillomavirus type 9
tgccaggaaaaatggagtta

SEQ ID NO: 47909 - DNA, 20 bp, Human papillomavirus type 9
tgcgattggggtaccaacct

SEQ ID NO: 47910 - DNA, 20 bp, Human papillomavirus type 9
ccaggtcggggtcgccaaca

SEQ ID NO: 47911 - DNA, 20 bp, Human papillomavirus type 9
caggtcggggtcgccaacaa

SEQ ID NO: 47912 - DNA, 20 bp, Human papillomavirus type 9
ttggcgaccccgacctggaa

SEQ ID NO: 47913 - DNA, 20 bp, Human papillomavirus type 9
gcgaccccgacctggaaagg

SEQ ID NO: 47914 - DNA, 20 bp, Human papillomavirus type 9
gaggtctctcccccgtctcc

SEQ ID NO: 47915 - DNA, 20 bp, Human papillomavirus type 9
cacctccccttccccttcgc

SEQ ID NO: 47916 - DNA, 20 bp, Human papillomavirus type 9
cccttcgcctgtcggtgggg

SEQ ID NO: 47917 - DNA, 20 bp, Human papillomavirus type 9
gcctgtcggtgggggtagtg

SEQ ID NO: 47918 - DNA, 20 bp, Human papillomavirus type 9
atgctgttgcgtggcgacgc

SEQ ID NO: 47919 - DNA, 20 bp, Human papillomavirus type 9
cgtggcgacgccaatgtgct

SEQ ID NO: 47920 - DNA, 20 bp, Human papillomavirus type 9
agtgctatcgctttcgggaa

SEQ ID NO: 47921 - DNA, 20 bp, Human papillomavirus type 9
cgggaacgcaaaaaaaaaag

SEQ ID NO: 47922 - DNA, 20 bp, Human papillomavirus type 9
gggaacgcaaaaaaaaaaga

SEQ ID NO: 47923 - DNA, 20 bp, Human papillomavirus type 9
ctactaacccatactaacta

SEQ ID NO: 47924 - DNA, 20 bp, Human papillomavirus type 9
gtgcaaaacgtactaaacgt

SEQ ID NO: 47925 - DNA, 20 bp, Human papillomavirus type 9
cagatatatacagaggctgc

SEQ ID NO: 47926 - DNA, 20 bp, Human papillomavirus type 9
gcagcctctgtatatatctg

SEQ ID NO: 47927 - DNA, 20 bp, Human papillomavirus type 9
cagcctctgtatatatctgt

SEQ ID NO: 47928 - DNA, 20 bp, Human papillomavirus type 9
cattaggggaagggccagga

SEQ ID NO: 47929 - DNA, 20 bp, Human papillomavirus type 9
ggggaagggccaggagtccg

SEQ ID NO: 47930 - DNA, 20 bp, Human papillomavirus type 9
gccctggggtgatacctgaa

SEQ ID NO: 47931 - DNA, 20 bp, Human papillomavirus type 9
gcccaactgatctaattcct

SEQ ID NO: 47932 - DNA, 20 bp, Human papillomavirus type 9
gatcagttgggccaattatt

SEQ ID NO: 47933 - DNA, 20 bp, Human papillomavirus type 9
taacagaaggtagaagaggc

SEQ ID NO: 47934 - DNA, 20 bp, Human papillomavirus type 9
tagaggtggctgacccaagc

SEQ ID NO: 47935 - DNA, 20 bp, Human papillomavirus type 9
agaggtggctgacccaagcc

SEQ ID NO: 47936 - DNA, 20 bp, Human papillomavirus type 9
gaggtggctgacccaagccc

SEQ ID NO: 47937 - DNA, 20 bp, Human papillomavirus type 9
gcataggagggcttgggtca

SEQ ID NO: 47938 - DNA, 20 bp, Human papillomavirus type 9
aggagcctccagataggcaa

SEQ ID NO: 47939 - DNA, 20 bp, Human papillomavirus type 9
ttagatgtacaacgccttag

SEQ ID NO: 47940 - DNA, 20 bp, Human papillomavirus type 9
tagatgtacaacgccttagt

SEQ ID NO: 47941 - DNA, 20 bp, Human papillomavirus type 9
agatgtacaacgccttagta

SEQ ID NO: 47942 - DNA, 20 bp, Human papillomavirus type 9
gatgtacaacgccttagtag

SEQ ID NO: 47943 - DNA, 20 bp, Human papillomavirus type 9
aaagttcaattgttgatgtt

SEQ ID NO: 47944 - DNA, 20 bp, Human papillomavirus type 9
aattgttgatgttaatattg

SEQ ID NO: 47945 - DNA, 20 bp, Human papillomavirus type 9
ttgatgttaatattgatgaa

SEQ ID NO: 47946 - DNA, 20 bp, Human papillomavirus type 9
atgttaatattgatgaacct

SEQ ID NO: 47947 - DNA, 20 bp, Human papillomavirus type 9
atattgatgaacctgatggt

SEQ ID NO: 47948 - DNA, 20 bp, Human papillomavirus type 9
tttatcatgcaattagtgac

SEQ ID NO: 47949 - DNA, 20 bp, Human papillomavirus type 9
ttatcatgcaattagtgacc

SEQ ID NO: 47950 - DNA, 20 bp, Human papillomavirus type 9
tatcatgcaattagtgaccg

SEQ ID NO: 47951 - DNA, 20 bp, Human papillomavirus type 9
atcatgcaattagtgaccgt

SEQ ID NO: 47952 - DNA, 20 bp, Human papillomavirus type 9
tcatgcaattagtgaccgtt

SEQ ID NO: 47953 - DNA, 20 bp, Human papillomavirus type 9
aaataggcagaggacaacct

SEQ ID NO: 47954 - DNA, 20 bp, Human papillomavirus type 9
aggggttggaacatcaggtc

SEQ ID NO: 47955 - DNA, 20 bp, Human papillomavirus type 9
ggggttggaacatcaggtca

SEQ ID NO: 47956 - DNA, 20 bp, Human papillomavirus type 9
gaacatcaggtcacccatta

SEQ ID NO: 47957 - DNA, 20 bp, Human papillomavirus type 9
tttaataaggttagagacac

SEQ ID NO: 47958 - DNA, 20 bp, Human papillomavirus type 9
gtgacgctgttcctgatggt

SEQ ID NO: 47959 - DNA, 20 bp, Human papillomavirus type 9
ctgatggtgcagtaaaccag

SEQ ID NO: 47960 - DNA, 20 bp, Human papillomavirus type 9
ctttttgccagcaaaaagtg

SEQ ID NO: 47961 - DNA, 20 bp, Human papillomavirus type 9
tttttgccagcaaaaagtga

SEQ ID NO: 47962 - DNA, 20 bp, Human papillomavirus type 9
ttgccagcaaaaagtgatca

SEQ ID NO: 47963 - DNA, 20 bp, Chlamydia trachomatis
taacagaattggggaaaaat

SEQ ID NO: 47964 - DNA, 20 bp, Chlamydia trachomatis
gggaaaaatttcgataaaaa

SEQ ID NO: 47965 - DNA, 20 bp, Chlamydia trachomatis
cgataaaaaacggcccctcc

SEQ ID NO: 47966 - DNA, 20 bp, Chlamydia trachomatis
gataaaaaacggcccctcct

SEQ ID NO: 47967 - DNA, 20 bp, Chlamydia trachomatis
tgtatgcctcttggggaact

SEQ ID NO: 47968 - DNA, 20 bp, Chlamydia trachomatis
gactcttgtttcaaatatgg

SEQ ID NO: 47969 - DNA, 20 bp, Chlamydia trachomatis
tttcaaatatggcgctagct

SEQ ID NO: 47970 - DNA, 20 bp, Chlamydia trachomatis
caaatatggcgctagctgtg

SEQ ID NO: 47971 - DNA, 20 bp, Chlamydia trachomatis
aaatatggcgctagctgtgc

SEQ ID NO: 47972 - DNA, 20 bp, Chlamydia trachomatis
tttgtctttaatacggacat

SEQ ID NO: 47973 - DNA, 20 bp, Chlamydia trachomatis
ataggccagaagatcccaac

SEQ ID NO: 47974 - DNA, 20 bp, Chlamydia trachomatis
tcaacgggaacaaaaccaaa

SEQ ID NO: 47975 - DNA, 20 bp, Chlamydia trachomatis
caacgggaacaaaaccaaaa

SEQ ID NO: 47976 - DNA, 20 bp, Chlamydia trachomatis
aacgggaacaaaaccaaaat

SEQ ID NO: 47977 - DNA, 20 bp, Chlamydia trachomatis
tggttttgttcccgttgaaa

SEQ ID NO: 47978 - DNA, 20 bp, Chlamydia trachomatis
ataagttcttgaaacgatac

SEQ ID NO: 47979 - DNA, 20 bp, Chlamydia trachomatis
ttgaaacgatacagtggcat

SEQ ID NO: 47980 - DNA, 20 bp, Chlamydia trachomatis
aaacgatacagtggcattaa

SEQ ID NO: 47981 - DNA, 20 bp, Chlamydia trachomatis
agcagtctgctcctaagcct

SEQ ID NO: 47982 - DNA, 20 bp, Chlamydia trachomatis
cacaacggtttcaggcttag

SEQ ID NO: 47983 - DNA, 20 bp, Chlamydia trachomatis
taccaatttagaaggacagg

SEQ ID NO: 47984 - DNA, 20 bp, Chlamydia trachomatis
agaaggacaggaatcgagta

SEQ ID NO: 47985 - DNA, 20 bp, Chlamydia trachomatis
gaaggacaggaatcgagtac

SEQ ID NO: 47986 - DNA, 20 bp, Chlamydia trachomatis
acgtgtcttccctgaaggtt

SEQ ID NO: 47987 - DNA, 20 bp, Chlamydia trachomatis
cctgaaggttgagacaattt

SEQ ID NO: 47988 - DNA, 20 bp, Chlamydia trachomatis
tggatctctagagaagactg

SEQ ID NO: 47989 - DNA, 20 bp, Chlamydia trachomatis
cctgtacccagtaccgcaaa

SEQ ID NO: 47990 - DNA, 20 bp, Chlamydia trachomatis
ctgtacccagtaccgcaaag

SEQ ID NO: 47991 - DNA, 20 bp, Chlamydia trachomatis
gcggtactgggtacaggaaa

SEQ ID NO: 47992 - DNA, 20 bp, Chlamydia trachomatis
cggtactgggtacaggaaat

SEQ ID NO: 47993 - DNA, 20 bp, Chlamydia trachomatis
tcgtccagcgctgatatcag

SEQ ID NO: 47994 - DNA, 20 bp, Chlamydia trachomatis
gccatttcacaacggtttca

SEQ ID NO: 47995 - DNA, 20 bp, Chlamydia trachomatis
cacaacggtttcaataaaaa

SEQ ID NO: 47996 - DNA, 20 bp, Chlamydia trachomatis
acaacggtttcaataaaaag

SEQ ID NO: 47997 - DNA, 20 bp, Chlamydia trachomatis
caataaaaagctgtgcaaaa

SEQ ID NO: 47998 - DNA, 20 bp, Chlamydia trachomatis
gcgcttctgcagctaaaaga

SEQ ID NO: 47999 - DNA, 20 bp, Chlamydia trachomatis
cgcttctgcagctaaaagaa

SEQ ID NO: 48000 - DNA, 20 bp, Chlamydia trachomatis
tgcagctaaaagaaaaacga

SEQ ID NO: 48001 - DNA, 20 bp, Chlamydia trachomatis
tcgtacagctcacagttggc

SEQ ID NO: 48002 - DNA, 20 bp, Chlamydia trachomatis
gcgtcaacaattaatgaaat

SEQ ID NO: 48003 - DNA, 20 bp, Chlamydia trachomatis
tctccattatatcacttgtc

SEQ ID NO: 48004 - DNA, 20 bp, Chlamydia trachomatis
tatcacttgtctccgagtca

SEQ ID NO: 48005 - DNA, 20 bp, Chlamydia trachomatis
tctccgagtcaaggcagcgt

SEQ ID NO: 48006 - DNA, 20 bp, Chlamydia trachomatis
tacaattcccctctatctga

SEQ ID NO: 48007 - DNA, 20 bp, Chlamydia trachomatis
ccctctatctgaatacgccg

SEQ ID NO: 48008 - DNA, 20 bp, Chlamydia trachomatis
cttcaggaatgccttctcat

SEQ ID NO: 48009 - DNA, 20 bp, Chlamydia trachomatis
aggaatgccttctcatgtaa

SEQ ID NO: 48010 - DNA, 20 bp, Chlamydia trachomatis
tcatgtaaagatggaagatc

SEQ ID NO: 48011 - DNA, 20 bp, Chlamydia trachomatis
atgctctgggggttgaaggg

SEQ ID NO: 48012 - DNA, 20 bp, Chlamydia trachomatis
tgctctgggggttgaagggt

SEQ ID NO: 48013 - DNA, 20 bp, Chlamydia trachomatis
gccgtgatgggcaaaaacct

SEQ ID NO: 48014 - DNA, 20 bp, Chlamydia trachomatis
tattgaacatggtggatcat

SEQ ID NO: 48015 - DNA, 20 bp, Chlamydia trachomatis
aacatggtggatcatggttt

SEQ ID NO: 48016 - DNA, 20 bp, Chlamydia trachomatis
ttctgtttctgtctataacc

SEQ ID NO: 48017 - DNA, 20 bp, Chlamydia trachomatis
tctgtttctgtctataaccg

SEQ ID NO: 48018 - DNA, 20 bp, Chlamydia trachomatis
tgccgcttagctttttcttt

SEQ ID NO: 48019 - DNA, 20 bp, Chlamydia trachomatis
gctttttcttttctaaagga

SEQ ID NO: 48020 - DNA, 20 bp, Chlamydia trachomatis
ttcttttctaaaggatttgt

SEQ ID NO: 48021 - DNA, 20 bp, Chlamydia trachomatis
tcttttctaaaggatttgtc

SEQ ID NO: 48022 - DNA, 20 bp, Chlamydia trachomatis
cttttctaaaggatttgtca

SEQ ID NO: 48023 - DNA, 20 bp, Chlamydia trachomatis
cgtcctccaacaatcgcctg

SEQ ID NO: 48024 - DNA, 20 bp, Chlamydia trachomatis
tggctcatcagttgatgctt

SEQ ID NO: 48025 - DNA, 20 bp, Chlamydia trachomatis
atgctttgcctgaatgagag

SEQ ID NO: 48026 - DNA, 20 bp, Chlamydia trachomatis
gcctgaatgagagtggactt

SEQ ID NO: 48027 - DNA, 20 bp, Chlamydia trachomatis
cctgaatgagagtggactta

SEQ ID NO: 48028 - DNA, 20 bp, Chlamydia trachomatis
ctaaatgcgctaccgctgca

SEQ ID NO: 48029 - DNA, 20 bp, Chlamydia trachomatis
gtcttcaaacagcatgatgt

SEQ ID NO: 48030 - DNA, 20 bp, Chlamydia trachomatis
tcttcaaacagcatgatgtc

SEQ ID NO: 48031 - DNA, 20 bp, Chlamydia trachomatis
aaacagcatgatgtccgata

SEQ ID NO: 48032 - DNA, 20 bp, Chlamydia trachomatis
acccgactatcggacatcat

SEQ ID NO: 48033 - DNA, 20 bp, Chlamydia trachomatis
cgttcattttgtacagcata

SEQ ID NO: 48034 - DNA, 20 bp, Chlamydia trachomatis
attttgtacagcatatcgac

SEQ ID NO: 48035 - DNA, 20 bp, Chlamydia trachomatis
tgtacagcatatcgacaagg

SEQ ID NO: 48036 - DNA, 20 bp, Chlamydia trachomatis
gtacagcatatcgacaaggg

SEQ ID NO: 48037 - DNA, 20 bp, Chlamydia trachomatis
tacagcatatcgacaaggga

SEQ ID NO: 48038 - DNA, 20 bp, Chlamydia trachomatis
cattgcaaaaagctcctaag

SEQ ID NO: 48039 - DNA, 20 bp, Chlamydia trachomatis
caaaaagctcctaagactag

SEQ ID NO: 48040 - DNA, 20 bp, Chlamydia trachomatis
ttgtagagggtgatgcagac

SEQ ID NO: 48041 - DNA, 20 bp, Chlamydia trachomatis
tgtagagggtgatgcagact

SEQ ID NO: 48042 - DNA, 20 bp, Chlamydia trachomatis
gtagagggtgatgcagactt

SEQ ID NO: 48043 - DNA, 20 bp, Chlamydia trachomatis
gcccgtttgagagggaatga

SEQ ID NO: 48044 - DNA, 20 bp, Chlamydia trachomatis
gagagggaatgaaccttcaa

SEQ ID NO: 48045 - DNA, 20 bp, Chlamydia trachomatis
agagggaatgaaccttcaac

SEQ ID NO: 48046 - DNA, 20 bp, Chlamydia trachomatis
aacttgcgatactgtgatga

SEQ ID NO: 48047 - DNA, 20 bp, Chlamydia trachomatis
cgatactgtgatgatgagtt

SEQ ID NO: 48048 - DNA, 20 bp, Chlamydia trachomatis
cgaaaggtgtgtacattatc

SEQ ID NO: 48049 - DNA, 20 bp, Chlamydia trachomatis
tcaacgtaggagttgggaag

SEQ ID NO: 48050 - DNA, 20 bp, Chlamydia trachomatis
ccaactcctacgttgataat

SEQ ID NO: 48051 - DNA, 20 bp, Chlamydia trachomatis
ataatgtacacacctttcgc

SEQ ID NO: 48052 - DNA, 20 bp, Chlamydia trachomatis
cgcaagcatttgcaggcctg

SEQ ID NO: 48053 - DNA, 20 bp, Chlamydia trachomatis
aagaaggaatgggacatgtg

SEQ ID NO: 48054 - DNA, 20 bp, Chlamydia trachomatis
tcgggggcataaaggagaac

SEQ ID NO: 48055 - DNA, 20 bp, Chlamydia trachomatis
cgggggcataaaggagaacc

SEQ ID NO: 48056 - DNA, 20 bp, Chlamydia trachomatis
gggggcataaaggagaacct

SEQ ID NO: 48057 - DNA, 20 bp, Chlamydia trachomatis
tctcagtatatcgcgtattc

SEQ ID NO: 48058 - DNA, 20 bp, Chlamydia trachomatis
gagagcggttgagtgctatt

SEQ ID NO: 48059 - DNA, 20 bp, Chlamydia trachomatis
agtgctatttcggataagca

SEQ ID NO: 48060 - DNA, 20 bp, Chlamydia trachomatis
cggataagcaatggttggct

SEQ ID NO: 48061 - DNA, 20 bp, Chlamydia trachomatis
ggataagcaatggttggcta

SEQ ID NO: 48062 - DNA, 20 bp, Chlamydia trachomatis
gctattagctcccaggttac

SEQ ID NO: 48063 - DNA, 20 bp, Chlamydia trachomatis
ccatggaagaggtagcaaag

SEQ ID NO: 48064 - DNA, 20 bp, Chlamydia trachomatis
catggaagaggtagcaaagg

SEQ ID NO: 48065 - DNA, 20 bp, Chlamydia trachomatis
ctcgcttaacagaagaggat

SEQ ID NO: 48066 - DNA, 20 bp, Chlamydia trachomatis
tcgcttaacagaagaggata

SEQ ID NO: 48067 - DNA, 20 bp, Chlamydia trachomatis
acagaagaggataagacaaa

SEQ ID NO: 48068 - DNA, 20 bp, Chlamydia trachomatis
ctccgaatgttcgggagact

SEQ ID NO: 48069 - DNA, 20 bp, Chlamydia trachomatis
gggagactcaggaaattgga

SEQ ID NO: 48070 - DNA, 20 bp, Chlamydia trachomatis
gatagcaaaaccgctttcct

SEQ ID NO: 48071 - DNA, 20 bp, Chlamydia trachomatis
cctgtgtgtaatcataacgc

SEQ ID NO: 48072 - DNA, 20 bp, Chlamydia trachomatis
ctgtgtgtaatcataacgct

SEQ ID NO: 48073 - DNA, 20 bp, Chlamydia trachomatis
cccaaatccattatcacaca

SEQ ID NO: 48074 - DNA, 20 bp, Chlamydia trachomatis
ccaaatccattatcacacac

SEQ ID NO: 48075 - DNA, 20 bp, Chlamydia trachomatis
tcacacacaactagaacgct

SEQ ID NO: 48076 - DNA, 20 bp, Chlamydia trachomatis
gatcttcagttacaacttga

SEQ ID NO: 48077 - DNA, 20 bp, Chlamydia trachomatis
atcttcagttacaacttgac

SEQ ID NO: 48078 - DNA, 20 bp, Chlamydia trachomatis
tccgaaatagaaatacctcc

SEQ ID NO: 48079 - DNA, 20 bp, Chlamydia trachomatis
caatatgcgaacaacgacct

SEQ ID NO: 48080 - DNA, 20 bp, Chlamydia trachomatis
cctcatcgatactgttatcc

SEQ ID NO: 48081 - DNA, 20 bp, Chlamydia trachomatis
ttgtaccgaggtcgttgttc

SEQ ID NO: 48082 - DNA, 20 bp, Chlamydia trachomatis
tgtaccgaggtcgttgttcg

SEQ ID NO: 48083 - DNA, 20 bp, Chlamydia trachomatis
taaacaaagaagctcttgcc

SEQ ID NO: 48084 - DNA, 20 bp, Chlamydia trachomatis
aaacaaagaagctcttgcct

SEQ ID NO: 48085 - DNA, 20 bp, Chlamydia trachomatis
aacaaagaagctcttgcctc

SEQ ID NO: 48086 - DNA, 20 bp, Chlamydia trachomatis
cctccttggcttttgttaaa

SEQ ID NO: 48087 - DNA, 20 bp, Chlamydia trachomatis
gcttttgttaaacctgcaaa

SEQ ID NO: 48088 - DNA, 20 bp, Chlamydia trachomatis
ctctactccgtgaagctgac

SEQ ID NO: 48089 - DNA, 20 bp, Chlamydia trachomatis
tctactccgtgaagctgact

SEQ ID NO: 48090 - DNA, 20 bp, Chlamydia trachomatis
gccgatctttatgtagtagc

SEQ ID NO: 48091 - DNA, 20 bp, Chlamydia trachomatis
atgtagtagcccctttagaa

SEQ ID NO: 48092 - DNA, 20 bp, Chlamydia trachomatis
tgtagtagcccctttagaag

SEQ ID NO: 48093 - DNA, 20 bp, Chlamydia trachomatis
ccttttcttcttgctgcact

SEQ ID NO: 48094 - DNA, 20 bp, Chlamydia trachomatis
cttttcttcttgctgcactt

SEQ ID NO: 48095 - DNA, 20 bp, Chlamydia trachomatis
tcttcttgctgcacttaaca

SEQ ID NO: 48096 - DNA, 20 bp, Chlamydia trachomatis
cttcttgctgcacttaacac

SEQ ID NO: 48097 - DNA, 20 bp, Chlamydia trachomatis
ttcttgctgcacttaacacc

SEQ ID NO: 48098 - DNA, 20 bp, Chlamydia trachomatis
tcaatacactgaaaaagaca

SEQ ID NO: 48099 - DNA, 20 bp, Chlamydia trachomatis
actgaacactctagctgccc

SEQ ID NO: 48100 - DNA, 20 bp, Chlamydia trachomatis
ctgaacactctagctgccct

SEQ ID NO: 48101 - DNA, 20 bp, Chlamydia trachomatis
agtaaagcttgtgcagcttg

SEQ ID NO: 48102 - DNA, 20 bp, Chlamydia trachomatis
tgcagcttgtgtgtcttttg

SEQ ID NO: 48103 - DNA, 20 bp, Chlamydia trachomatis
ctgtcagcgaacggttcttc

SEQ ID NO: 48104 - DNA, 20 bp, Chlamydia trachomatis
ttcttaggaggtgaaaccac

SEQ ID NO: 48105 - DNA, 20 bp, Chlamydia trachomatis
ttaggaggtgaaaccactgt

SEQ ID NO: 48106 - DNA, 20 bp, Chlamydia trachomatis
ggaggtgaaaccactgttcg

SEQ ID NO: 48107 - DNA, 20 bp, Chlamydia trachomatis
gcggttacaaaccttttatt

SEQ ID NO: 48108 - DNA, 20 bp, Chlamydia trachomatis
gtaaagctgaacaggatgtc

SEQ ID NO: 48109 - DNA, 20 bp, Chlamydia trachomatis
ggcctccaccattcggaaaa

SEQ ID NO: 48110 - DNA, 20 bp, Chlamydia trachomatis
gcctccaccattcggaaaaa

SEQ ID NO: 48111 - DNA, 20 bp, Chlamydia trachomatis
ggaaaaatcactccccaagg

SEQ ID NO: 48112 - DNA, 20 bp, Chlamydia trachomatis
gggagtgatttttccgaatg

SEQ ID NO: 48113 - DNA, 20 bp, Chlamydia trachomatis
cttagaacaacttcaaaatt

SEQ ID NO: 48114 - DNA, 20 bp, Chlamydia trachomatis
gaacaacttcaaaattttgt

SEQ ID NO: 48115 - DNA, 20 bp, Chlamydia trachomatis
aaaattttgtaactactccg

SEQ ID NO: 48116 - DNA, 20 bp, Chlamydia trachomatis
tgtaactactccgataaccg

SEQ ID NO: 48117 - DNA, 20 bp, Chlamydia trachomatis
gtaactactccgataaccga

SEQ ID NO: 48118 - DNA, 20 bp, Chlamydia trachomatis
ctctaaattatctgcttccc

SEQ ID NO: 48119 - DNA, 20 bp, Chlamydia trachomatis
tctgcttcccaagtagcgaa

SEQ ID NO: 48120 - DNA, 20 bp, Chlamydia trachomatis
ccaagtagcgaaaaatccaa

SEQ ID NO: 48121 - DNA, 20 bp, Chlamydia trachomatis
tatagctgttggatttttcg

SEQ ID NO: 48122 - DNA, 20 bp, Chlamydia trachomatis
gatttttcgctacttgggaa

SEQ ID NO: 48123 - DNA, 20 bp, Chlamydia trachomatis
tggatcaacaatcaaccttt

SEQ ID NO: 48124 - DNA, 20 bp, Chlamydia trachomatis
gatcgctatcttaggtatct

SEQ ID NO: 48125 - DNA, 20 bp, Chlamydia trachomatis
atcgctatcttaggtatctg

SEQ ID NO: 48126 - DNA, 20 bp, Chlamydia trachomatis
ggtatctgctcagctcttgc

SEQ ID NO: 48127 - DNA, 20 bp, Chlamydia trachomatis
cggttacgactacggtgact

SEQ ID NO: 48128 - DNA, 20 bp, Chlamydia trachomatis
acaggaattgatatttccaa

SEQ ID NO: 48129 - DNA, 20 bp, Chlamydia trachomatis
atatttccaaacccacaaca

SEQ ID NO: 48130 - DNA, 20 bp, Chlamydia trachomatis
ccaaacccacaacatctaaa

SEQ ID NO: 48131 - DNA, 20 bp, Chlamydia trachomatis
caaacccacaacatctaaac

SEQ ID NO: 48132 - DNA, 20 bp, Chlamydia trachomatis
gtcacgaatatagccactga

SEQ ID NO: 48133 - DNA, 20 bp, Chlamydia trachomatis
taaatccacatcccctttag

SEQ ID NO: 48134 - DNA, 20 bp, Chlamydia trachomatis
agaacattgaagatcctcta

SEQ ID NO: 48135 - DNA, 20 bp, Chlamydia trachomatis
gaacattgaagatcctctaa

SEQ ID NO: 48136 - DNA, 20 bp, Chlamydia trachomatis
aagatcctctaaatttgaac

SEQ ID NO: 48137 - DNA, 20 bp, Chlamydia trachomatis
gaacctccgataaaaatgta

SEQ ID NO: 48138 - DNA, 20 bp, Chlamydia trachomatis
cttctttaagagataagcaa

SEQ ID NO: 48139 - DNA, 20 bp, Chlamydia trachomatis
tttaagagataagcaacaac

SEQ ID NO: 48140 - DNA, 20 bp, Chlamydia trachomatis
aagagataagcaacaaccga

SEQ ID NO: 48141 - DNA, 20 bp, Chlamydia trachomatis
agagataagcaacaaccgag

SEQ ID NO: 48142 - DNA, 20 bp, Chlamydia trachomatis
tacgcacaatgaacccagaa

SEQ ID NO: 48143 - DNA, 20 bp, Chlamydia trachomatis
gcaacaacggtatcgacagt

SEQ ID NO: 48144 - DNA, 20 bp, Chlamydia trachomatis
ccagaagaaatcacccatgt

SEQ ID NO: 48145 - DNA, 20 bp, Chlamydia trachomatis
cttcctcaaaacaagagaaa

SEQ ID NO: 48146 - DNA, 20 bp, Chlamydia trachomatis
ctcaaaacaagagaaaggca

SEQ ID NO: 48147 - DNA, 20 bp, Chlamydia trachomatis
tgatcacaagattatggtgc

SEQ ID NO: 48148 - DNA, 20 bp, Chlamydia trachomatis
tagaggcagcagttcttcag

SEQ ID NO: 48149 - DNA, 20 bp, Chlamydia trachomatis
agaggcagcagttcttcaga

SEQ ID NO: 48150 - DNA, 20 bp, Chlamydia trachomatis
gaggcagcagttcttcagaa

SEQ ID NO: 48151 - DNA, 20 bp, Chlamydia trachomatis
ttcagaaccctgacggattg

SEQ ID NO: 48152 - DNA, 20 bp, Chlamydia trachomatis
agaaccctgacggattgtcg

SEQ ID NO: 48153 - DNA, 20 bp, Chlamydia trachomatis
ctaacttatcaaacagccct

SEQ ID NO: 48154 - DNA, 20 bp, Chlamydia trachomatis
taacttatcaaacagccctt

SEQ ID NO: 48155 - DNA, 20 bp, Chlamydia trachomatis
tcaaacagcccttcttttac

SEQ ID NO: 48156 - DNA, 20 bp, Chlamydia trachomatis
ttttaccagggctgcatcgt

SEQ ID NO: 48157 - DNA, 20 bp, Chlamydia trachomatis
taccagggctgcatcgtctc

SEQ ID NO: 48158 - DNA, 20 bp, Chlamydia trachomatis
aatagcctctgcagccttat

SEQ ID NO: 48159 - DNA, 20 bp, Chlamydia trachomatis
tctccagcagcaaaaactaa

SEQ ID NO: 48160 - DNA, 20 bp, Chlamydia trachomatis
gcaaaactttacctgtaccg

SEQ ID NO: 48161 - DNA, 20 bp, Chlamydia trachomatis
tgcgaattttagtttttgct

SEQ ID NO: 48162 - DNA, 20 bp, Chlamydia trachomatis
gcgaattttagtttttgctg

SEQ ID NO: 48163 - DNA, 20 bp, Chlamydia trachomatis
cctcaggcagagttaccaca

SEQ ID NO: 48164 - DNA, 20 bp, Chlamydia trachomatis
ccacacctgtgacgtctgtt

SEQ ID NO: 48165 - DNA, 20 bp, Chlamydia trachomatis
tacggaagaagaattgaggt

SEQ ID NO: 48166 - DNA, 20 bp, Chlamydia trachomatis
aggtctatatcctgtgaaga

SEQ ID NO: 48167 - DNA, 20 bp, Chlamydia trachomatis
cttcacaggatatagacctc

SEQ ID NO: 48168 - DNA, 20 bp, Chlamydia trachomatis
ctctttccacatcgttctta

SEQ ID NO: 48169 - DNA, 20 bp, Chlamydia trachomatis
ccacatcgttcttaccaata

SEQ ID NO: 48170 - DNA, 20 bp, Chlamydia trachomatis
cacatcgttcttaccaatac

SEQ ID NO: 48171 - DNA, 20 bp, Chlamydia trachomatis
ttaccaatacctctgaggag

SEQ ID NO: 48172 - DNA, 20 bp, Chlamydia trachomatis
ccaatacctctgaggagcaa

SEQ ID NO: 48173 - DNA, 20 bp, Chlamydia trachomatis
ctctgcccgaagaaatggaa

SEQ ID NO: 48174 - DNA, 20 bp, Chlamydia trachomatis
tctgcccgaagaaatggaac

SEQ ID NO: 48175 - DNA, 20 bp, Chlamydia trachomatis
ggcaagaaaccacaagtagt

SEQ ID NO: 48176 - DNA, 20 bp, Chlamydia trachomatis
ctatgctcgacaataaaatt

SEQ ID NO: 48177 - DNA, 20 bp, Chlamydia trachomatis
gttgagctgagcaattttat

SEQ ID NO: 48178 - DNA, 20 bp, Chlamydia trachomatis
cggaacgcacccccattctt

SEQ ID NO: 48179 - DNA, 20 bp, Chlamydia trachomatis
tttacggaggatctgtgaaa

SEQ ID NO: 48180 - DNA, 20 bp, Chlamydia trachomatis
acggaggatctgtgaaagcc

SEQ ID NO: 48181 - DNA, 20 bp, Chlamydia trachomatis
cggaggatctgtgaaagccg

SEQ ID NO: 48182 - DNA, 20 bp, Chlamydia trachomatis
ccctctgccctgatgttaat

SEQ ID NO: 48183 - DNA, 20 bp, Chlamydia trachomatis
cataacctgtccttcctgtt

SEQ ID NO: 48184 - DNA, 20 bp, Chlamydia trachomatis
ctgtttagggaaacgattcc

SEQ ID NO: 48185 - DNA, 20 bp, Chlamydia trachomatis
agggaaacgattcctccctc

SEQ ID NO: 48186 - DNA, 20 bp, Chlamydia trachomatis
gggaaacgattcctccctca

SEQ ID NO: 48187 - DNA, 20 bp, Chlamydia trachomatis
taatacttgagggaggaatc

SEQ ID NO: 48188 - DNA, 20 bp, Chlamydia trachomatis
tcgcgatagaaaaaacgagc

SEQ ID NO: 48189 - DNA, 20 bp, Chlamydia trachomatis
caatcattctgtggcttctg

SEQ ID NO: 48190 - DNA, 20 bp, Chlamydia trachomatis
tgtggcttctgcattagaaa

SEQ ID NO: 48191 - DNA, 20 bp, Chlamydia trachomatis
tgcattagaaatctcagaaa

SEQ ID NO: 48192 - DNA, 20 bp, Chlamydia trachomatis
gaaatctcagaaatgctaga

SEQ ID NO: 48193 - DNA, 20 bp, Chlamydia trachomatis
cgaagaaacaccacaacttt

SEQ ID NO: 48194 - DNA, 20 bp, Chlamydia trachomatis
ctgtctcagtatccacttct

SEQ ID NO: 48195 - DNA, 20 bp, Chlamydia trachomatis
tgtctcagtatccacttcta

SEQ ID NO: 48196 - DNA, 20 bp, Chlamydia trachomatis
tacgatccaaattgagaacc

SEQ ID NO: 48197 - DNA, 20 bp, Chlamydia trachomatis
agaaccttgctttcccttta

SEQ ID NO: 48198 - DNA, 20 bp, Chlamydia trachomatis
tgccgcctcctcgaaggaca

SEQ ID NO: 48199 - DNA, 20 bp, Chlamydia trachomatis
gccgcctcctcgaaggacag

SEQ ID NO: 48200 - DNA, 20 bp, Chlamydia trachomatis
ccgcctcctcgaaggacagc

SEQ ID NO: 48201 - DNA, 20 bp, Chlamydia trachomatis
ttactagctccttgtcgaga

SEQ ID NO: 48202 - DNA, 20 bp, Chlamydia trachomatis
ctagctccttgtcgagaact

SEQ ID NO: 48203 - DNA, 20 bp, Chlamydia trachomatis
ttcaaagaattggctaacag

SEQ ID NO: 48204 - DNA, 20 bp, Chlamydia trachomatis
tcaaagaattggctaacagc

SEQ ID NO: 48205 - DNA, 20 bp, Chlamydia trachomatis
caaagaattggctaacagct

SEQ ID NO: 48206 - DNA, 20 bp, Chlamydia trachomatis
aaagaattggctaacagctt

SEQ ID NO: 48207 - DNA, 20 bp, Chlamydia trachomatis
gctaacagcttgcgtctttg

SEQ ID NO: 48208 - DNA, 20 bp, Chlamydia trachomatis
cttcggatcttccaaactta

SEQ ID NO: 48209 - DNA, 20 bp, Chlamydia trachomatis
ggatcttccaaacttaccat

SEQ ID NO: 48210 - DNA, 20 bp, Chlamydia trachomatis
tatggtaagtttggaagatc

SEQ ID NO: 48211 - DNA, 20 bp, Chlamydia trachomatis
ggaagatccgaagcaagatc

SEQ ID NO: 48212 - DNA, 20 bp, Chlamydia trachomatis
gaagatccgaagcaagatcg

SEQ ID NO: 48213 - DNA, 20 bp, Chlamydia trachomatis
tgtgtagagcctcaaagact

SEQ ID NO: 48214 - DNA, 20 bp, Chlamydia trachomatis
gctcccactaatgcaactaa

SEQ ID NO: 48215 - DNA, 20 bp, Chlamydia trachomatis
tgaggggcctttatctttag

SEQ ID NO: 48216 - DNA, 20 bp, Chlamydia trachomatis
atctttagttgcattagtgg

SEQ ID NO: 48217 - DNA, 20 bp, Chlamydia trachomatis
tctttagttgcattagtggg

SEQ ID NO: 48218 - DNA, 20 bp, Chlamydia trachomatis
tagcgaggtctgagatcttc

SEQ ID NO: 48219 - DNA, 20 bp, Chlamydia trachomatis
ttgaaaacccctttcccaaa

SEQ ID NO: 48220 - DNA, 20 bp, Chlamydia trachomatis
aaaacccctttcccaaaaaa

SEQ ID NO: 48221 - DNA, 20 bp, Chlamydia trachomatis
cccaaaaaacagtgaggacg

SEQ ID NO: 48222 - DNA, 20 bp, Chlamydia trachomatis
ccaaaaaacagtgaggacga

SEQ ID NO: 48223 - DNA, 20 bp, Chlamydia trachomatis
ttaacgtggtaactccaccg

SEQ ID NO: 48224 - DNA, 20 bp, Chlamydia trachomatis
acgtggtaactccaccgaca

SEQ ID NO: 48225 - DNA, 20 bp, Chlamydia trachomatis
ctgaaaaagcaatcgctaaa

SEQ ID NO: 48226 - DNA, 20 bp, Chlamydia trachomatis
cggaactccaggagctagta

SEQ ID NO: 48227 - DNA, 20 bp, Chlamydia trachomatis
cgcaatcgattgttttagcg

SEQ ID NO: 48228 - DNA, 20 bp, Chlamydia trachomatis
gacactaccaagcagatttt

SEQ ID NO: 48229 - DNA, 20 bp, Chlamydia trachomatis
tcctttgcggtcttccttct

SEQ ID NO: 48230 - DNA, 20 bp, Chlamydia trachomatis
cctttgcggtcttccttctg

SEQ ID NO: 48231 - DNA, 20 bp, Chlamydia trachomatis
ctttgcggtcttccttctgt

SEQ ID NO: 48232 - DNA, 20 bp, Chlamydia trachomatis
gcggtcttccttctgtaggt

SEQ ID NO: 48233 - DNA, 20 bp, Chlamydia trachomatis
ggttttactgactgctctgc

SEQ ID NO: 48234 - DNA, 20 bp, Chlamydia trachomatis
tactgactgctctgctctcc

SEQ ID NO: 48235 - DNA, 20 bp, Chlamydia trachomatis
actgactgctctgctctccc

SEQ ID NO: 48236 - DNA, 20 bp, Chlamydia trachomatis
ctgactgctctgctctccct

SEQ ID NO: 48237 - DNA, 20 bp, Chlamydia trachomatis
cttttacgactaccatgcag

SEQ ID NO: 48238 - DNA, 20 bp, Chlamydia trachomatis
ttctttagaagatctcttct

SEQ ID NO: 48239 - DNA, 20 bp, Chlamydia trachomatis
tctttagaagatctcttctc

SEQ ID NO: 48240 - DNA, 20 bp, Chlamydia trachomatis
ctttagaagatctcttctct

SEQ ID NO: 48241 - DNA, 20 bp, Chlamydia trachomatis
tttagaagatctcttctctc

SEQ ID NO: 48242 - DNA, 20 bp, Chlamydia trachomatis
agaagatctcttctctccat

SEQ ID NO: 48243 - DNA, 20 bp, Chlamydia trachomatis
ttgctttgctgtactgagct

SEQ ID NO: 48244 - DNA, 20 bp, Chlamydia trachomatis
tgctttgctgtactgagctg

SEQ ID NO: 48245 - DNA, 20 bp, Chlamydia trachomatis
gctttgctgtactgagctgc

SEQ ID NO: 48246 - DNA, 20 bp, Chlamydia trachomatis
ctttgctgtactgagctgca

SEQ ID NO: 48247 - DNA, 20 bp, Chlamydia trachomatis
gctgtactgagctgcaacta

SEQ ID NO: 48248 - DNA, 20 bp, Chlamydia trachomatis
ctcctcccaaagagaagaaa

SEQ ID NO: 48249 - DNA, 20 bp, Chlamydia trachomatis
tcctcccaaagagaagaaat

SEQ ID NO: 48250 - DNA, 20 bp, Chlamydia trachomatis
tcctgccatgctaacggacg

SEQ ID NO: 48251 - DNA, 20 bp, Chlamydia trachomatis
ccttttccatgacttgtttc

SEQ ID NO: 48252 - DNA, 20 bp, Chlamydia trachomatis
cttttccatgacttgtttca

SEQ ID NO: 48253 - DNA, 20 bp, Chlamydia trachomatis
gtacgcttctcttccttagg

SEQ ID NO: 48254 - DNA, 20 bp, Chlamydia trachomatis
tacgcttctcttccttaggg

SEQ ID NO: 48255 - DNA, 20 bp, Chlamydia trachomatis
tcttccttagggaaacgtga

SEQ ID NO: 48256 - DNA, 20 bp, Chlamydia trachomatis
cttagggaaacgtgaagaca

SEQ ID NO: 48257 - DNA, 20 bp, Chlamydia trachomatis
gggaaacgtgaagacatatt

SEQ ID NO: 48258 - DNA, 20 bp, Chlamydia trachomatis
cctggaaaagtcatccctat

SEQ ID NO: 48259 - DNA, 20 bp, Chlamydia trachomatis
agccctttctgacaatctgt

SEQ ID NO: 48260 - DNA, 20 bp, Chlamydia trachomatis
ctgacaatctgtgcagctta

SEQ ID NO: 48261 - DNA, 20 bp, Chlamydia trachomatis
tgacaatctgtgcagcttaa

SEQ ID NO: 48262 - DNA, 20 bp, Chlamydia trachomatis
aaacctaatgtggatcgctt

SEQ ID NO: 48263 - DNA, 20 bp, Chlamydia trachomatis
ctgagcatttgcgtcctgga

SEQ ID NO: 48264 - DNA, 20 bp, Chlamydia trachomatis
gcgtcctggagctgttattt

SEQ ID NO: 48265 - DNA, 20 bp, Chlamydia trachomatis
cgtcctggagctgttatttc

SEQ ID NO: 48266 - DNA, 20 bp, Chlamydia trachomatis
tttctgtgcaactggcttct

SEQ ID NO: 48267 - DNA, 20 bp, Chlamydia trachomatis
ctgtgcaactggcttctgtc

SEQ ID NO: 48268 - DNA, 20 bp, Chlamydia trachomatis
tttcttactatatttccctt

SEQ ID NO: 48269 - DNA, 20 bp, Chlamydia trachomatis
ttcttactatatttcccttt

SEQ ID NO: 48270 - DNA, 20 bp, Chlamydia trachomatis
tcttactatatttccctttg

SEQ ID NO: 48271 - DNA, 20 bp, Chlamydia trachomatis
cttactatatttccctttgt

SEQ ID NO: 48272 - DNA, 20 bp, Chlamydia trachomatis
ttactatatttccctttgta

SEQ ID NO: 48273 - DNA, 20 bp, Chlamydia trachomatis
ttcagaatgtcggtttaacc

SEQ ID NO: 48274 - DNA, 20 bp, Chlamydia trachomatis
agaatgtcggtttaacccat

SEQ ID NO: 48275 - DNA, 20 bp, Chlamydia trachomatis
aacccatgtctggggacccc

SEQ ID NO: 48276 - DNA, 20 bp, Chlamydia trachomatis
acccatgtctggggacccct

SEQ ID NO: 48277 - DNA, 20 bp, Chlamydia trachomatis
ctgtcaattctacattatgt

SEQ ID NO: 48278 - DNA, 20 bp, Chlamydia trachomatis
tacaacagaaactcttactt

SEQ ID NO: 48279 - DNA, 20 bp, Chlamydia trachomatis
aagtaagagtttctgttgta

SEQ ID NO: 48280 - DNA, 20 bp, Chlamydia trachomatis
ctgttgtagaaccagcttct

SEQ ID NO: 48281 - DNA, 20 bp, Chlamydia trachomatis
tgttgtagaaccagcttctg

SEQ ID NO: 48282 - DNA, 20 bp, Chlamydia trachomatis
tagaaccagcttctggctca

SEQ ID NO: 48283 - DNA, 20 bp, Chlamydia trachomatis
ggttattttatgacacgaat

SEQ ID NO: 48284 - DNA, 20 bp, Chlamydia trachomatis
ttttatgacacgaatgagta

SEQ ID NO: 48285 - DNA, 20 bp, Chlamydia trachomatis
tatgacacgaatgagtaaac

SEQ ID NO: 48286 - DNA, 20 bp, Chlamydia trachomatis
atgacacgaatgagtaaaca

SEQ ID NO: 48287 - DNA, 20 bp, Chlamydia trachomatis
tgacacgaatgagtaaacaa

SEQ ID NO: 48288 - DNA, 20 bp, Chlamydia trachomatis
gtgatgactgcgcgttaaac

SEQ ID NO: 48289 - DNA, 20 bp, Chlamydia trachomatis
aacttttttgcaacatcctc

SEQ ID NO: 48290 - DNA, 20 bp, Chlamydia trachomatis
tttgcaacatcctctttcga

SEQ ID NO: 48291 - DNA, 20 bp, Chlamydia trachomatis
ttgcaacatcctctttcgaa

SEQ ID NO: 48292 - DNA, 20 bp, Chlamydia trachomatis
tgcaacatcctctttcgaaa

SEQ ID NO: 48293 - DNA, 20 bp, Chlamydia trachomatis
aggaattacccctccgacga

SEQ ID NO: 48294 - DNA, 20 bp, Chlamydia trachomatis
ggaattacccctccgacgat

SEQ ID NO: 48295 - DNA, 20 bp, Chlamydia trachomatis
cccctccgacgatcttactg

SEQ ID NO: 48296 - DNA, 20 bp, Chlamydia trachomatis
ctgacaacctcgtttccttt

SEQ ID NO: 48297 - DNA, 20 bp, Chlamydia trachomatis
ccttttccaggttcatttgg

SEQ ID NO: 48298 - DNA, 20 bp, Chlamydia trachomatis
actttgactgtatacattct

SEQ ID NO: 48299 - DNA, 20 bp, Chlamydia trachomatis
gactgtatacattctgccaa

SEQ ID NO: 48300 - DNA, 20 bp, Chlamydia trachomatis
actgtatacattctgccaaa

SEQ ID NO: 48301 - DNA, 20 bp, Chlamydia trachomatis
tgccaaagcaagaatcctgt

SEQ ID NO: 48302 - DNA, 20 bp, Chlamydia trachomatis
aggtcctgtagctttagact

SEQ ID NO: 48303 - DNA, 20 bp, Chlamydia trachomatis
gttgcacccaattcattgac

SEQ ID NO: 48304 - DNA, 20 bp, Chlamydia trachomatis
cacccaattcattgactgta

SEQ ID NO: 48305 - DNA, 20 bp, Chlamydia trachomatis
ggtgcaacgaatagtgcctt

SEQ ID NO: 48306 - DNA, 20 bp, Chlamydia trachomatis
attgatcgttttgctaggga

SEQ ID NO: 48307 - DNA, 20 bp, Chlamydia trachomatis
atcgttttgctagggatttc

SEQ ID NO: 48308 - DNA, 20 bp, Chlamydia trachomatis
cctgtagaatagcgacacga

SEQ ID NO: 48309 - DNA, 20 bp, Chlamydia trachomatis
gcactcaaacactcgtgaaa

SEQ ID NO: 48310 - DNA, 20 bp, Chlamydia trachomatis
ttaccaaacctttcaaatac

SEQ ID NO: 48311 - DNA, 20 bp, Chlamydia trachomatis
taccaaacctttcaaatacc

SEQ ID NO: 48312 - DNA, 20 bp, Chlamydia trachomatis
accaaacctttcaaataccc

SEQ ID NO: 48313 - DNA, 20 bp, Chlamydia trachomatis
aagagcagcattcttaataa

SEQ ID NO: 48314 - DNA, 20 bp, Chlamydia trachomatis
ttaataatcgttcgtccttg

SEQ ID NO: 48315 - DNA, 20 bp, Chlamydia trachomatis
ataatcgttcgtccttgagc

SEQ ID NO: 48316 - DNA, 20 bp, Chlamydia trachomatis
gtccttgagcccctacagaa

SEQ ID NO: 48317 - DNA, 20 bp, Chlamydia trachomatis
agcccctacagaagcaagga

SEQ ID NO: 48318 - DNA, 20 bp, Chlamydia trachomatis
caatcacttgcgcttgctga

SEQ ID NO: 48319 - DNA, 20 bp, Chlamydia trachomatis
aatcacttgcgcttgctgat

SEQ ID NO: 48320 - DNA, 20 bp, Chlamydia trachomatis
cgcttgctgatcccactcta

SEQ ID NO: 48321 - DNA, 20 bp, Chlamydia trachomatis
ctgatcccactctacaatcg

SEQ ID NO: 48322 - DNA, 20 bp, Chlamydia trachomatis
ggcaaacggtagatctttgt

SEQ ID NO: 48323 - DNA, 20 bp, Chlamydia trachomatis
ctccataatcaaccaggtag

SEQ ID NO: 48324 - DNA, 20 bp, Chlamydia trachomatis
tccataatcaaccaggtagg

SEQ ID NO: 48325 - DNA, 20 bp, Chlamydia trachomatis
gataaaagcatctaggagct

SEQ ID NO: 48326 - DNA, 20 bp, Chlamydia trachomatis
ataaaagcatctaggagctc

SEQ ID NO: 48327 - DNA, 20 bp, Chlamydia trachomatis
tatcaaagcctacctggttg

SEQ ID NO: 48328 - DNA, 20 bp, Chlamydia trachomatis
gttagaatctgagtttttcg

SEQ ID NO: 48329 - DNA, 20 bp, Chlamydia trachomatis
ttagaatctgagtttttcgg

SEQ ID NO: 48330 - DNA, 20 bp, Chlamydia trachomatis
gaatctgagtttttcgggca

SEQ ID NO: 48331 - DNA, 20 bp, Chlamydia trachomatis
ttcgggcacgaaaaaggagc

SEQ ID NO: 48332 - DNA, 20 bp, Chlamydia trachomatis
tcgggcacgaaaaaggagct

SEQ ID NO: 48333 - DNA, 20 bp, Chlamydia trachomatis
acaatcacgcaccataatac

SEQ ID NO: 48334 - DNA, 20 bp, Chlamydia trachomatis
acacggatttgtcagtattt

SEQ ID NO: 48335 - DNA, 20 bp, Chlamydia trachomatis
cacggatttgtcagtatttg

SEQ ID NO: 48336 - DNA, 20 bp, Chlamydia trachomatis
gtcagtatttgcttacagag

SEQ ID NO: 48337 - DNA, 20 bp, Chlamydia trachomatis
tcagtatttgcttacagaga

SEQ ID NO: 48338 - DNA, 20 bp, Chlamydia trachomatis
gtaacctgctccaaaggaac

SEQ ID NO: 48339 - DNA, 20 bp, Chlamydia trachomatis
aacacttgcgaagcggtgaa

SEQ ID NO: 48340 - DNA, 20 bp, Chlamydia trachomatis
cgaagcggtgaatgcatgaa

SEQ ID NO: 48341 - DNA, 20 bp, Chlamydia trachomatis
taattctggcgaggatattc

SEQ ID NO: 48342 - DNA, 20 bp, Chlamydia trachomatis
aattctggcgaggatattca

SEQ ID NO: 48343 - DNA, 20 bp, Chlamydia trachomatis
acaagaagttctagcacgca

SEQ ID NO: 48344 - DNA, 20 bp, Chlamydia trachomatis
caagaagttctagcacgcac

SEQ ID NO: 48345 - DNA, 20 bp, Chlamydia trachomatis
tagcacgcacgactggaaaa

SEQ ID NO: 48346 - DNA, 20 bp, Chlamydia trachomatis
tatgttaaagttctaaaaaa

SEQ ID NO: 48347 - DNA, 20 bp, Chlamydia trachomatis
tttttagaactttaacatac

SEQ ID NO: 48348 - DNA, 20 bp, Chlamydia trachomatis
ctattgcttcaagcatttta

SEQ ID NO: 48349 - DNA, 20 bp, Chlamydia trachomatis
cttcaagcattttactatgc

SEQ ID NO: 48350 - DNA, 20 bp, Chlamydia trachomatis
aagcattttactatgctcga

SEQ ID NO: 48351 - DNA, 20 bp, Chlamydia trachomatis
tactatgctcgatatcaacg

SEQ ID NO: 48352 - DNA, 20 bp, Chlamydia trachomatis
actatgctcgatatcaacgt

SEQ ID NO: 48353 - DNA, 20 bp, Chlamydia trachomatis
ccctttacgttttaaatatc

SEQ ID NO: 48354 - DNA, 20 bp, Chlamydia trachomatis
cctttacgttttaaatatct

SEQ ID NO: 48355 - DNA, 20 bp, Chlamydia trachomatis
acgttttaaatatctgttga

SEQ ID NO: 48356 - DNA, 20 bp, Chlamydia trachomatis
cgttttaaatatctgttgat

SEQ ID NO: 48357 - DNA, 20 bp, Chlamydia trachomatis
taaatatctgttgatagcaa

SEQ ID NO: 48358 - DNA, 20 bp, Chlamydia trachomatis
ttataccattccgaccgagc

SEQ ID NO: 48359 - DNA, 20 bp, Chlamydia trachomatis
taccattccgaccgagcaat

SEQ ID NO: 48360 - DNA, 20 bp, Chlamydia trachomatis
cgaccgagcaatctcagctc

SEQ ID NO: 48361 - DNA, 20 bp, Chlamydia trachomatis
ctggtcgtttagctggagct

SEQ ID NO: 48362 - DNA, 20 bp, Chlamydia trachomatis
tggtcgtttagctggagctg

SEQ ID NO: 48363 - DNA, 20 bp, Chlamydia trachomatis
tatattttcattggactctg

SEQ ID NO: 48364 - DNA, 20 bp, Chlamydia trachomatis
atattttcattggactctgc

SEQ ID NO: 48365 - DNA, 20 bp, Chlamydia trachomatis
tattttcattggactctgca

SEQ ID NO: 48366 - DNA, 20 bp, Chlamydia trachomatis
tcattggactctgcatttgc

SEQ ID NO: 48367 - DNA, 20 bp, Chlamydia trachomatis
cattggactctgcatttgca

SEQ ID NO: 48368 - DNA, 20 bp, Chlamydia trachomatis
tgattggagttttcttctcc

SEQ ID NO: 48369 - DNA, 20 bp, Chlamydia trachomatis
gattggagttttcttctcca

SEQ ID NO: 48370 - DNA, 20 bp, Chlamydia trachomatis
attggagttttcttctccaa

SEQ ID NO: 48371 - DNA, 20 bp, Chlamydia trachomatis
gagttttcttctccaaagcg

SEQ ID NO: 48372 - DNA, 20 bp, Chlamydia trachomatis
tcttctccaaagcgttcata

SEQ ID NO: 48373 - DNA, 20 bp, Chlamydia trachomatis
ggaccgaaaacaatccctcc

SEQ ID NO: 48374 - DNA, 20 bp, Chlamydia trachomatis
aggagctgccaagcaacctt

SEQ ID NO: 48375 - DNA, 20 bp, Chlamydia trachomatis
acgggcattccccgtccctt

SEQ ID NO: 48376 - DNA, 20 bp, Chlamydia trachomatis
cccgtccctttttgtctaaa

SEQ ID NO: 48377 - DNA, 20 bp, Chlamydia trachomatis
tagacaaaaagggacgggga

SEQ ID NO: 48378 - DNA, 20 bp, Chlamydia trachomatis
taagcgcaaagctcttctct

SEQ ID NO: 48379 - DNA, 20 bp, Chlamydia trachomatis
aagcgcaaagctcttctctg

SEQ ID NO: 48380 - DNA, 20 bp, Chlamydia trachomatis
agcgcaaagctcttctctgg

SEQ ID NO: 48381 - DNA, 20 bp, Chlamydia trachomatis
tctggtctgcttccctaaac

SEQ ID NO: 48382 - DNA, 20 bp, Chlamydia trachomatis
cctaaaccggcgtatttctt

SEQ ID NO: 48383 - DNA, 20 bp, Chlamydia trachomatis
taggacacattgcaaagaaa

SEQ ID NO: 48384 - DNA, 20 bp, Chlamydia trachomatis
caaagaaattccctggggaa

SEQ ID NO: 48385 - DNA, 20 bp, Chlamydia trachomatis
cctggggaagaccctcttac

SEQ ID NO: 48386 - DNA, 20 bp, Chlamydia trachomatis
cgctggttaaagaacgtctc

SEQ ID NO: 48387 - DNA, 20 bp, Chlamydia trachomatis
aagaacgtctcaaattggaa

SEQ ID NO: 48388 - DNA, 20 bp, Chlamydia trachomatis
aaaatgcttttgagatcgga

SEQ ID NO: 48389 - DNA, 20 bp, Chlamydia trachomatis
tgagatcggagtcttgattt

SEQ ID NO: 48390 - DNA, 20 bp, Chlamydia trachomatis
gagatcggagtcttgattta

SEQ ID NO: 48391 - DNA, 20 bp, Chlamydia trachomatis
agatcggagtcttgatttac

SEQ ID NO: 48392 - DNA, 20 bp, Chlamydia trachomatis
atttacctccctttctttgt

SEQ ID NO: 48393 - DNA, 20 bp, Chlamydia trachomatis
gatgggattgctgctacctc

SEQ ID NO: 48394 - DNA, 20 bp, Chlamydia trachomatis
ctgctacctcaggtgataca

SEQ ID NO: 48395 - DNA, 20 bp, Chlamydia trachomatis
tctatatccttcttattaag

SEQ ID NO: 48396 - DNA, 20 bp, Chlamydia trachomatis
ctatatccttcttattaagg

SEQ ID NO: 48397 - DNA, 20 bp, Chlamydia trachomatis
ataagaaggatatagaaaat

SEQ ID NO: 48398 - DNA, 20 bp, Chlamydia trachomatis
ttaataggcccgtttttagc

SEQ ID NO: 48399 - DNA, 20 bp, Chlamydia trachomatis
taataggcccgtttttagcg

SEQ ID NO: 48400 - DNA, 20 bp, Chlamydia trachomatis
aataggcccgtttttagcgt

SEQ ID NO: 48401 - DNA, 20 bp, Chlamydia trachomatis
ataggcccgtttttagcgta

SEQ ID NO: 48402 - DNA, 20 bp, Chlamydia trachomatis
ttagcgtaatagctctgcag

SEQ ID NO: 48403 - DNA, 20 bp, Chlamydia trachomatis
ctacatcgccgatagcttga

SEQ ID NO: 48404 - DNA, 20 bp, Chlamydia trachomatis
atgaagctaaaccaacccga

SEQ ID NO: 48405 - DNA, 20 bp, Chlamydia trachomatis
agattcttcgggttggttta

SEQ ID NO: 48406 - DNA, 20 bp, Chlamydia trachomatis
ttcgggttggtttagcttca

SEQ ID NO: 48407 - DNA, 20 bp, Chlamydia trachomatis
gggttggtttagcttcatca

SEQ ID NO: 48408 - DNA, 20 bp, Chlamydia trachomatis
tcccagacaaagaagctgct

SEQ ID NO: 48409 - DNA, 20 bp, Chlamydia trachomatis
cccagacaaagaagctgctc

SEQ ID NO: 48410 - DNA, 20 bp, Chlamydia trachomatis
ccagacaaagaagctgctct

SEQ ID NO: 48411 - DNA, 20 bp, Chlamydia trachomatis
cctatttttctcaaaatccc

SEQ ID NO: 48412 - DNA, 20 bp, Chlamydia trachomatis
ttctcaaaatccctttaaag

SEQ ID NO: 48413 - DNA, 20 bp, Chlamydia trachomatis
ttttcatcgtgtaatttatg

SEQ ID NO: 48414 - DNA, 20 bp, Chlamydia trachomatis
tcatcgtgtaatttatgtat

SEQ ID NO: 48415 - DNA, 20 bp, Chlamydia trachomatis
catcgtgtaatttatgtatc

SEQ ID NO: 48416 - DNA, 20 bp, Chlamydia trachomatis
atcgtgtaatttatgtatcc

SEQ ID NO: 48417 - DNA, 20 bp, Chlamydia trachomatis
atgtatccgcaactcctgga

SEQ ID NO: 48418 - DNA, 20 bp, Chlamydia trachomatis
gagacgacctatttgtgacg

SEQ ID NO: 48419 - DNA, 20 bp, Chlamydia trachomatis
gtgacgaattctgcattgat

SEQ ID NO: 48420 - DNA, 20 bp, Chlamydia trachomatis
tgacgaattctgcattgatt

SEQ ID NO: 48421 - DNA, 20 bp, Chlamydia trachomatis
tgcattgattgctgaaggaa

SEQ ID NO: 48422 - DNA, 20 bp, Chlamydia trachomatis
attgctgaaggaatcgctca

SEQ ID NO: 48423 - DNA, 20 bp, Chlamydia trachomatis
cggcaatccacttcgatagc

SEQ ID NO: 48424 - DNA, 20 bp, Chlamydia trachomatis
ggcaatccacttcgatagcc

SEQ ID NO: 48425 - DNA, 20 bp, Chlamydia trachomatis
gatagcctggtggaggggcc

SEQ ID NO: 48426 - DNA, 20 bp, Chlamydia trachomatis
cgtaatctatgggattcgga

SEQ ID NO: 48427 - DNA, 20 bp, Chlamydia trachomatis
ggcgttgtatccgaatccca

SEQ ID NO: 48428 - DNA, 20 bp, Chlamydia trachomatis
acgaagaacctgggagacaa

SEQ ID NO: 48429 - DNA, 20 bp, Chlamydia trachomatis
aatggttgtcttgcggtgca

SEQ ID NO: 48430 - DNA, 20 bp, Chlamydia trachomatis
tcttgcggtgcatcttgtct

SEQ ID NO: 48431 - DNA, 20 bp, Chlamydia trachomatis
cggtgcatcttgtctcccag

SEQ ID NO: 48432 - DNA, 20 bp, Chlamydia trachomatis
tctcccaggttcttcgtcaa

SEQ ID NO: 48433 - DNA, 20 bp, Chlamydia trachomatis
cgctcgcaactaacagtcat

SEQ ID NO: 48434 - DNA, 20 bp, Chlamydia trachomatis
cgctgctcttacaagacggt

SEQ ID NO: 48435 - DNA, 20 bp, Chlamydia trachomatis
taagagcagcggaactatat

SEQ ID NO: 48436 - DNA, 20 bp, Chlamydia trachomatis
gggtgttgcgcatggatgac

SEQ ID NO: 48437 - DNA, 20 bp, Chlamydia trachomatis
cgcatggatgactgttagtt

SEQ ID NO: 48438 - DNA, 20 bp, Chlamydia trachomatis
ggacgatccagaacaattaa

SEQ ID NO: 48439 - DNA, 20 bp, Chlamydia trachomatis
attccttcttgctgctcgca

SEQ ID NO: 48440 - DNA, 20 bp, Chlamydia trachomatis
cttcttgctgctcgcagatg

SEQ ID NO: 48441 - DNA, 20 bp, Chlamydia trachomatis
ttgctgctcgcagatgcttt

SEQ ID NO: 48442 - DNA, 20 bp, Chlamydia trachomatis
ctgctcgcagatgcttttac

SEQ ID NO: 48443 - DNA, 20 bp, Chlamydia trachomatis
cctagaagatctagctctaa

SEQ ID NO: 48444 - DNA, 20 bp, Chlamydia trachomatis
ctagaagatctagctctaaa

SEQ ID NO: 48445 - DNA, 20 bp, Chlamydia trachomatis
cgcagatgaaacagcaagtt

SEQ ID NO: 48446 - DNA, 20 bp, Chlamydia trachomatis
ccatgatcgcctcaagctca

SEQ ID NO: 48447 - DNA, 20 bp, Chlamydia trachomatis
actgttatggatcgtcatga

SEQ ID NO: 48448 - DNA, 20 bp, Chlamydia trachomatis
ggcttgaataaagacttctc

SEQ ID NO: 48449 - DNA, 20 bp, Chlamydia trachomatis
gcttgaataaagacttctcg

SEQ ID NO: 48450 - DNA, 20 bp, Chlamydia trachomatis
aataaagacttctcgagctt

SEQ ID NO: 48451 - DNA, 20 bp, Chlamydia trachomatis
tcgagcttgtcccaattgct

SEQ ID NO: 48452 - DNA, 20 bp, Chlamydia trachomatis
tcccaattgctccaccaact

SEQ ID NO: 48453 - DNA, 20 bp, Chlamydia trachomatis
ctttgcagcatctttgactt

SEQ ID NO: 48454 - DNA, 20 bp, Chlamydia trachomatis
gcagcatctttgacttgctg

SEQ ID NO: 48455 - DNA, 20 bp, Chlamydia trachomatis
cagcatctttgacttgctgg

SEQ ID NO: 48456 - DNA, 20 bp, Chlamydia trachomatis
gacttgctggctcaggcttt

SEQ ID NO: 48457 - DNA, 20 bp, Chlamydia trachomatis
acttgctggctcaggctttc

SEQ ID NO: 48458 - DNA, 20 bp, Chlamydia trachomatis
tctcaggacttccttctaat

SEQ ID NO: 48459 - DNA, 20 bp, Chlamydia trachomatis
cttctaatatcatcagcgga

SEQ ID NO: 48460 - DNA, 20 bp, Chlamydia trachomatis
taatatcatcagcggaggac

SEQ ID NO: 48461 - DNA, 20 bp, Chlamydia trachomatis
cccgtacaagcaagtgtgca

SEQ ID NO: 48462 - DNA, 20 bp, Chlamydia trachomatis
ttggtcagattgcacacttg

SEQ ID NO: 48463 - DNA, 20 bp, Chlamydia trachomatis
ttgcaacgatgataccgcag

SEQ ID NO: 48464 - DNA, 20 bp, Chlamydia trachomatis
caacgatgataccgcagcat

SEQ ID NO: 48465 - DNA, 20 bp, Chlamydia trachomatis
accatttgctgctgctcagc

SEQ ID NO: 48466 - DNA, 20 bp, Chlamydia trachomatis
gctgctgctcagctgttaaa

SEQ ID NO: 48467 - DNA, 20 bp, Chlamydia trachomatis
ctgctgctcagctgttaaaa

SEQ ID NO: 48468 - DNA, 20 bp, Chlamydia trachomatis
taggaaacactccgtgctca

SEQ ID NO: 48469 - DNA, 20 bp, Chlamydia trachomatis
aggaaacactccgtgctcat

SEQ ID NO: 48470 - DNA, 20 bp, Chlamydia trachomatis
ggaaacactccgtgctcata

SEQ ID NO: 48471 - DNA, 20 bp, Chlamydia trachomatis
tggtggttatgacgatgggg

SEQ ID NO: 48472 - DNA, 20 bp, Chlamydia trachomatis
tgacgatggggctattgctt

SEQ ID NO: 48473 - DNA, 20 bp, Chlamydia trachomatis
tattcgcacggaatacatca

SEQ ID NO: 48474 - DNA, 20 bp, Chlamydia trachomatis
gcacggaatacatcagatac

SEQ ID NO: 48475 - DNA, 20 bp, Chlamydia trachomatis
cgtgcgaatacaacagttac

SEQ ID NO: 48476 - DNA, 20 bp, Chlamydia trachomatis
cctgtccatttatttggtct

SEQ ID NO: 48477 - DNA, 20 bp, Chlamydia trachomatis
atttggtcttggagtcttca

SEQ ID NO: 48478 - DNA, 20 bp, Chlamydia trachomatis
gttttcgatgaccggatggc

SEQ ID NO: 48479 - DNA, 20 bp, Chlamydia trachomatis
ttttcgatgaccggatggct

SEQ ID NO: 48480 - DNA, 20 bp, Chlamydia trachomatis
tcgatgaccggatggctatg

SEQ ID NO: 48481 - DNA, 20 bp, Chlamydia trachomatis
cgatgaccggatggctatgc

SEQ ID NO: 48482 - DNA, 20 bp, Chlamydia trachomatis
gatgaccggatggctatgcc

SEQ ID NO: 48483 - DNA, 20 bp, Chlamydia trachomatis
ccgtctgttggagaatttcc

SEQ ID NO: 48484 - DNA, 20 bp, Chlamydia trachomatis
gagaatttcctgcgatcttt

SEQ ID NO: 48485 - DNA, 20 bp, Chlamydia trachomatis
cctgcgatcttttgtctaat

SEQ ID NO: 48486 - DNA, 20 bp, Chlamydia trachomatis
ctgcgatcttttgtctaatt

SEQ ID NO: 48487 - DNA, 20 bp, Chlamydia trachomatis
tgtctaattcttggattttt

SEQ ID NO: 48488 - DNA, 20 bp, Chlamydia trachomatis
ctttgcttatgcacctaagt

SEQ ID NO: 48489 - DNA, 20 bp, Chlamydia trachomatis
gcttatgcacctaagtgaag

SEQ ID NO: 48490 - DNA, 20 bp, Chlamydia trachomatis
cttatgcacctaagtgaagg

SEQ ID NO: 48491 - DNA, 20 bp, Chlamydia trachomatis
tgcacctaagtgaaggaaac

SEQ ID NO: 48492 - DNA, 20 bp, Chlamydia trachomatis
gtttttcatcaaggtggttg

SEQ ID NO: 48493 - DNA, 20 bp, Chlamydia trachomatis
tctcttttgctttgttaagg

SEQ ID NO: 48494 - DNA, 20 bp, Chlamydia trachomatis
ctcttttgctttgttaaggc

SEQ ID NO: 48495 - DNA, 20 bp, Chlamydia trachomatis
tcttttgctttgttaaggca

SEQ ID NO: 48496 - DNA, 20 bp, Chlamydia trachomatis
tgctttgttaaggcaagagc

SEQ ID NO: 48497 - DNA, 20 bp, Chlamydia trachomatis
gctttgttaaggcaagagca

SEQ ID NO: 48498 - DNA, 20 bp, Chlamydia trachomatis
ttctttgcagtaggccatgg

SEQ ID NO: 48499 - DNA, 20 bp, Chlamydia trachomatis
tctttgcagtaggccatggg

SEQ ID NO: 48500 - DNA, 20 bp, Chlamydia trachomatis
ctttgcagtaggccatgggg

SEQ ID NO: 48501 - DNA, 20 bp, Chlamydia trachomatis
tttgcagtaggccatgggga

SEQ ID NO: 48502 - DNA, 20 bp, Chlamydia trachomatis
gcagtaggccatggggatgg

SEQ ID NO: 48503 - DNA, 20 bp, Chlamydia trachomatis
agccgacatacgacggtaag

SEQ ID NO: 48504 - DNA, 20 bp, Chlamydia trachomatis
gcgggattttctgatttccc

SEQ ID NO: 48505 - DNA, 20 bp, Chlamydia trachomatis
tctgatttcccttaccgtcg

SEQ ID NO: 48506 - DNA, 20 bp, Chlamydia trachomatis
ctgatttcccttaccgtcgt

SEQ ID NO: 48507 - DNA, 20 bp, Chlamydia trachomatis
tgatttcccttaccgtcgta

SEQ ID NO: 48508 - DNA, 20 bp, Chlamydia trachomatis
agaatttatcaatgatcaac

SEQ ID NO: 48509 - DNA, 20 bp, Chlamydia trachomatis
gaatttatcaatgatcaact

SEQ ID NO: 48510 - DNA, 20 bp, Chlamydia trachomatis
atcaatgatcaactgcagtc

SEQ ID NO: 48511 - DNA, 20 bp, Chlamydia trachomatis
tcaatgatcaactgcagtcg

SEQ ID NO: 48512 - DNA, 20 bp, Chlamydia trachomatis
attgtgtgcgataggctttc

SEQ ID NO: 48513 - DNA, 20 bp, Chlamydia trachomatis
gatagaacgcatatcagaaa

SEQ ID NO: 48514 - DNA, 20 bp, Chlamydia trachomatis
ttgtacccaaaagaacaacc

SEQ ID NO: 48515 - DNA, 20 bp, Chlamydia trachomatis
tacccaaaagaacaaccgcg

SEQ ID NO: 48516 - DNA, 20 bp, Chlamydia trachomatis
agatgattttgttatttcct

SEQ ID NO: 48517 - DNA, 20 bp, Chlamydia trachomatis
tgttatttcctgtggacagc

SEQ ID NO: 48518 - DNA, 20 bp, Chlamydia trachomatis
gccttcggcaacaaaaatcg

SEQ ID NO: 48519 - DNA, 20 bp, Chlamydia trachomatis
ccttcggcaacaaaaatcgt

SEQ ID NO: 48520 - DNA, 20 bp, Chlamydia trachomatis
ggcaacaaaaatcgttgctg

SEQ ID NO: 48521 - DNA, 20 bp, Chlamydia trachomatis
ctgaagtagctcgctattct

SEQ ID NO: 48522 - DNA, 20 bp, Chlamydia trachomatis
agcaacgatttttgttgccg

SEQ ID NO: 48523 - DNA, 20 bp, Chlamydia trachomatis
ttgttagcaacaaaatcggt

SEQ ID NO: 48524 - DNA, 20 bp, Chlamydia trachomatis
ttagcaacaaaatcggtttc

SEQ ID NO: 48525 - DNA, 20 bp, Chlamydia trachomatis
gcaacaaaatcggtttcaac

SEQ ID NO: 48526 - DNA, 20 bp, Chlamydia trachomatis
caacgttaacttcaacaagc

SEQ ID NO: 48527 - DNA, 20 bp, Chlamydia trachomatis
aacgttaacttcaacaagcg

SEQ ID NO: 48528 - DNA, 20 bp, Chlamydia trachomatis
tcctgttggaagaggaagct

SEQ ID NO: 48529 - DNA, 20 bp, Chlamydia trachomatis
gaagaggaagctcttcaaca

SEQ ID NO: 48530 - DNA, 20 bp, Chlamydia trachomatis
aacagcttcttccgcaggtc

SEQ ID NO: 48531 - DNA, 20 bp, Chlamydia trachomatis
ttccgcaggtctttctgcag

SEQ ID NO: 48532 - DNA, 20 bp, Chlamydia trachomatis
cgcaggtctttctgcaggac

SEQ ID NO: 48533 - DNA, 20 bp, Chlamydia trachomatis
tcctgatttagtgaagcgct

SEQ ID NO: 48534 - DNA, 20 bp, Chlamydia trachomatis
agtgaagcgctatttaggat

SEQ ID NO: 48535 - DNA, 20 bp, Chlamydia trachomatis
gtgaagcgctatttaggatc

SEQ ID NO: 48536 - DNA, 20 bp, Chlamydia trachomatis
aggatccgtagtgccagctc

SEQ ID NO: 48537 - DNA, 20 bp, Chlamydia trachomatis
ggatccgtagtgccagctcg

SEQ ID NO: 48538 - DNA, 20 bp, Chlamydia trachomatis
ttgtatcataacgcataatc

SEQ ID NO: 48539 - DNA, 20 bp, Chlamydia trachomatis
tgtatcataacgcataatcc

SEQ ID NO: 48540 - DNA, 20 bp, Chlamydia trachomatis
gtatcataacgcataatcct

SEQ ID NO: 48541 - DNA, 20 bp, Chlamydia trachomatis
tatcataacgcataatccta

SEQ ID NO: 48542 - DNA, 20 bp, Chlamydia trachomatis
ggtgatctcctgcagccaga

SEQ ID NO: 48543 - DNA, 20 bp, Chlamydia trachomatis
atttgctgtagacggagctc

SEQ ID NO: 48544 - DNA, 20 bp, Chlamydia trachomatis
tttgctgtagacggagctca

SEQ ID NO: 48545 - DNA, 20 bp, Chlamydia trachomatis
gctgtagacggagctcaagg

SEQ ID NO: 48546 - DNA, 20 bp, Chlamydia trachomatis
ctgtagacggagctcaagga

SEQ ID NO: 48547 - DNA, 20 bp, Chlamydia trachomatis
ggaaagggcctcttaatctt

SEQ ID NO: 48548 - DNA, 20 bp, Chlamydia trachomatis
tgcaatcgacctctgggcct

SEQ ID NO: 48549 - DNA, 20 bp, Chlamydia trachomatis
cgaaggccatacggtatctt

SEQ ID NO: 48550 - DNA, 20 bp, Chlamydia trachomatis
tcgaggaggatttcaaggga

SEQ ID NO: 48551 - DNA, 20 bp, Chlamydia trachomatis
aaatcctcctcgagaagata

SEQ ID NO: 48552 - DNA, 20 bp, Chlamydia trachomatis
gtaattaggcccagaggtcg

SEQ ID NO: 48553 - DNA, 20 bp, Chlamydia trachomatis
cgaagatcgattagtaaata

SEQ ID NO: 48554 - DNA, 20 bp, Chlamydia trachomatis
gtaaataatgatgctccggt

SEQ ID NO: 48555 - DNA, 20 bp, Chlamydia trachomatis
ttgatgatgctgtagacgat

SEQ ID NO: 48556 - DNA, 20 bp, Chlamydia trachomatis
atgatgctgtagacgatatt

SEQ ID NO: 48557 - DNA, 20 bp, Chlamydia trachomatis
aatatcgtctacagcatcat

SEQ ID NO: 48558 - DNA, 20 bp, Chlamydia trachomatis
gatggggcgtcctaagagca

SEQ ID NO: 48559 - DNA, 20 bp, Chlamydia trachomatis
atacccagcattgcgtaatt

SEQ ID NO: 48560 - DNA, 20 bp, Chlamydia trachomatis
ttcggaaattacgcaatgct

SEQ ID NO: 48561 - DNA, 20 bp, Chlamydia trachomatis
ggaaattacgcaatgctggg

SEQ ID NO: 48562 - DNA, 20 bp, Chlamydia trachomatis
cgcaatgctgggtatcaagc

SEQ ID NO: 48563 - DNA, 20 bp, Chlamydia trachomatis
tgcgagaacgctttgccagt

SEQ ID NO: 48564 - DNA, 20 bp, Chlamydia trachomatis
gcgagaacgctttgccagta

SEQ ID NO: 48565 - DNA, 20 bp, Chlamydia trachomatis
cgagaacgctttgccagtat

SEQ ID NO: 48566 - DNA, 20 bp, Chlamydia trachomatis
gccagtattccgaaattatg

SEQ ID NO: 48567 - DNA, 20 bp, Chlamydia trachomatis
ccagtattccgaaattatgc

SEQ ID NO: 48568 - DNA, 20 bp, Chlamydia trachomatis
aggcaacgttaagaggctat

SEQ ID NO: 48569 - DNA, 20 bp, Chlamydia trachomatis
agaggctatcagaaagaagg

SEQ ID NO: 48570 - DNA, 20 bp, Chlamydia trachomatis
gttagagcgtctgcgtaaga

SEQ ID NO: 48571 - DNA, 20 bp, Chlamydia trachomatis
gagcgtctgcgtaagatgca

SEQ ID NO: 48572 - DNA, 20 bp, Chlamydia trachomatis
atggaattcttgcagatgac

SEQ ID NO: 48573 - DNA, 20 bp, Chlamydia trachomatis
agcagcttacaacatttgaa

SEQ ID NO: 48574 - DNA, 20 bp, Chlamydia trachomatis
caacatttgaaagtgctgtg

SEQ ID NO: 48575 - DNA, 20 bp, Chlamydia trachomatis
gaaagtgctgtgattgaagg

SEQ ID NO: 48576 - DNA, 20 bp, Chlamydia trachomatis
aaagtgctgtgattgaaggt

SEQ ID NO: 48577 - DNA, 20 bp, Chlamydia trachomatis
aaggtgggcgtaatggtgtg

SEQ ID NO: 48578 - DNA, 20 bp, Chlamydia trachomatis
gactgtacttcaatcatccc

SEQ ID NO: 48579 - DNA, 20 bp, Chlamydia trachomatis
aatcatcccgtccgtaactt

SEQ ID NO: 48580 - DNA, 20 bp, Chlamydia trachomatis
tgattcagaattgagaggtt

SEQ ID NO: 48581 - DNA, 20 bp, Chlamydia trachomatis
agaattgagaggttccgagg

SEQ ID NO: 48582 - DNA, 20 bp, Chlamydia trachomatis
agaggttccgaggtgaagtc

SEQ ID NO: 48583 - DNA, 20 bp, Chlamydia trachomatis
aaaatattaagcagtcgaaa

SEQ ID NO: 48584 - DNA, 20 bp, Chlamydia trachomatis
agcagtcgaaagacaagagg

SEQ ID NO: 48585 - DNA, 20 bp, Chlamydia trachomatis
gcctcaataaatttttggca

SEQ ID NO: 48586 - DNA, 20 bp, Chlamydia trachomatis
ttggcatcagcaggagttgc

SEQ ID NO: 48587 - DNA, 20 bp, Chlamydia trachomatis
tggcatcagcaggagttgct

SEQ ID NO: 48588 - DNA, 20 bp, Chlamydia trachomatis
tggaccaaaatcttcgcatc

SEQ ID NO: 48589 - DNA, 20 bp, Chlamydia trachomatis
gcatcctgaacaggttaaat

SEQ ID NO: 48590 - DNA, 20 bp, Chlamydia trachomatis
aacctgttcaggatgcgaag

SEQ ID NO: 48591 - DNA, 20 bp, Chlamydia trachomatis
acctgttcaggatgcgaaga

SEQ ID NO: 48592 - DNA, 20 bp, Chlamydia trachomatis
aggatgcgaagattttggtc

SEQ ID NO: 48593 - DNA, 20 bp, Chlamydia trachomatis
tgtctgagcaacaactgttt

SEQ ID NO: 48594 - DNA, 20 bp, Chlamydia trachomatis
gtctgagcaacaactgtttt

SEQ ID NO: 48595 - DNA, 20 bp, Chlamydia trachomatis
tctgagcaacaactgttttt

SEQ ID NO: 48596 - DNA, 20 bp, Chlamydia trachomatis
tttatgcgcaaagccgttgc

SEQ ID NO: 48597 - DNA, 20 bp, Chlamydia trachomatis
ttatgcgcaaagccgttgcc

SEQ ID NO: 48598 - DNA, 20 bp, Chlamydia trachomatis
ttctgtaggaagggttttga

SEQ ID NO: 48599 - DNA, 20 bp, Chlamydia trachomatis
tgtaggaagggttttgaagc

SEQ ID NO: 48600 - DNA, 20 bp, Chlamydia trachomatis
tgaagcttgtggttaaaatc

SEQ ID NO: 48601 - DNA, 20 bp, Chlamydia trachomatis
gaagcttgtggttaaaatcg

SEQ ID NO: 48602 - DNA, 20 bp, Chlamydia trachomatis
aagcttgtggttaaaatcgc

SEQ ID NO: 48603 - DNA, 20 bp, Chlamydia trachomatis
gagcaattacgggatgaaca

SEQ ID NO: 48604 - DNA, 20 bp, Chlamydia trachomatis
agcaattacgggatgaacat

SEQ ID NO: 48605 - DNA, 20 bp, Chlamydia trachomatis
cgggatgaacatctgtgatc

SEQ ID NO: 48606 - DNA, 20 bp, Chlamydia trachomatis
aagagatcacagatgttcat

SEQ ID NO: 48607 - DNA, 20 bp, Chlamydia trachomatis
atcccgtaattgctcaaagt

SEQ ID NO: 48608 - DNA, 20 bp, Chlamydia trachomatis
acgtttatgcgaggagttgc

SEQ ID NO: 48609 - DNA, 20 bp, Chlamydia trachomatis
cgtttatgcgaggagttgca

SEQ ID NO: 48610 - DNA, 20 bp, Chlamydia trachomatis
atgcgaggagttgcaagaaa

SEQ ID NO: 48611 - DNA, 20 bp, Chlamydia trachomatis
tgcgaggagttgcaagaaaa

SEQ ID NO: 48612 - DNA, 20 bp, Chlamydia trachomatis
caagaaaatctgacttcagg

SEQ ID NO: 48613 - DNA, 20 bp, Chlamydia trachomatis
cggctgcccgcataatgatt

SEQ ID NO: 48614 - DNA, 20 bp, Chlamydia trachomatis
ctgttttcccgaaccctgca

SEQ ID NO: 48615 - DNA, 20 bp, Chlamydia trachomatis
tgttttcccgaaccctgcat

SEQ ID NO: 48616 - DNA, 20 bp, Chlamydia trachomatis
tcccgaaccctgcatctcca

SEQ ID NO: 48617 - DNA, 20 bp, Chlamydia trachomatis
cccgaaccctgcatctccac

SEQ ID NO: 48618 - DNA, 20 bp, Chlamydia trachomatis
tagtagaaaaatagttccgt

SEQ ID NO: 48619 - DNA, 20 bp, Chlamydia trachomatis
cgttgtttttgtctacggag

SEQ ID NO: 48620 - DNA, 20 bp, Chlamydia trachomatis
tttttgtctacggaggactt

SEQ ID NO: 48621 - DNA, 20 bp, Chlamydia trachomatis
ttgtctacggaggactttgc

SEQ ID NO: 48622 - DNA, 20 bp, Chlamydia trachomatis
tgtctacggaggactttgct

SEQ ID NO: 48623 - DNA, 20 bp, Chlamydia trachomatis
gaatgttggcttagaggcag

SEQ ID NO: 48624 - DNA, 20 bp, Chlamydia trachomatis
gcttagaggcagcaatcatt

SEQ ID NO: 48625 - DNA, 20 bp, Chlamydia trachomatis
gaggcagcaatcatttaaag

SEQ ID NO: 48626 - DNA, 20 bp, Chlamydia trachomatis
aaagagtgcgtaacagctca

SEQ ID NO: 48627 - DNA, 20 bp, Chlamydia trachomatis
aagagtgcgtaacagctcac

SEQ ID NO: 48628 - DNA, 20 bp, Chlamydia trachomatis
agtttgttcagaaagagaat

SEQ ID NO: 48629 - DNA, 20 bp, Chlamydia trachomatis
gttcagaaagagaatcatcg

SEQ ID NO: 48630 - DNA, 20 bp, Chlamydia trachomatis
ttcagaaagagaatcatcgg

SEQ ID NO: 48631 - DNA, 20 bp, Chlamydia trachomatis
agaaagagaatcatcggctt

SEQ ID NO: 48632 - DNA, 20 bp, Chlamydia trachomatis
cccaaactccatgtgcggca

SEQ ID NO: 48633 - DNA, 20 bp, Chlamydia trachomatis
ttgcctgccatgcgtttcga

SEQ ID NO: 48634 - DNA, 20 bp, Chlamydia trachomatis
tgcctgccatgcgtttcgaa

SEQ ID NO: 48635 - DNA, 20 bp, Chlamydia trachomatis
gcctgccatgcgtttcgaac

SEQ ID NO: 48636 - DNA, 20 bp, Chlamydia trachomatis
cctgccatgcgtttcgaaca

SEQ ID NO: 48637 - DNA, 20 bp, Chlamydia trachomatis
cgaacagcaagagcacaatg

SEQ ID NO: 48638 - DNA, 20 bp, Chlamydia trachomatis
aagcagttggttgggatgga

SEQ ID NO: 48639 - DNA, 20 bp, Chlamydia trachomatis
agcagttggttgggatggaa

SEQ ID NO: 48640 - DNA, 20 bp, Chlamydia trachomatis
gttgggatggaagaggttct

SEQ ID NO: 48641 - DNA, 20 bp, Chlamydia trachomatis
ggatggaagaggttctttta

SEQ ID NO: 48642 - DNA, 20 bp, Chlamydia trachomatis
ttttatgaatcgtagaaaca

SEQ ID NO: 48643 - DNA, 20 bp, Chlamydia trachomatis
tccgctggttgcaaagaggt

SEQ ID NO: 48644 - DNA, 20 bp, Chlamydia trachomatis
ccgctggttgcaaagaggta

SEQ ID NO: 48645 - DNA, 20 bp, Chlamydia trachomatis
cgctggttgcaaagaggtaa

SEQ ID NO: 48646 - DNA, 20 bp, Chlamydia trachomatis
caaagaggtaacaatcactc

SEQ ID NO: 48647 - DNA, 20 bp, Chlamydia trachomatis
tagggagcgaatgttgctgt

SEQ ID NO: 48648 - DNA, 20 bp, Chlamydia trachomatis
ctaggagggaagcagttcca

SEQ ID NO: 48649 - DNA, 20 bp, Chlamydia trachomatis
taggagggaagcagttccac

SEQ ID NO: 48650 - DNA, 20 bp, Chlamydia trachomatis
cactgatttatcctccggtt

SEQ ID NO: 48651 - DNA, 20 bp, Chlamydia trachomatis
atcctccggttccagatcct

SEQ ID NO: 48652 - DNA, 20 bp, Chlamydia trachomatis
tcctccggttccagatccta

SEQ ID NO: 48653 - DNA, 20 bp, Chlamydia trachomatis
gtttcgagtgctttcatcat

SEQ ID NO: 48654 - DNA, 20 bp, Chlamydia trachomatis
cgagtgctttcatcatcgct

SEQ ID NO: 48655 - DNA, 20 bp, Chlamydia trachomatis
gagtgctttcatcatcgcta

SEQ ID NO: 48656 - DNA, 20 bp, Chlamydia trachomatis
catcatcgctagcgacacgc

SEQ ID NO: 48657 - DNA, 20 bp, Chlamydia trachomatis
atcatcgctagcgacacgca

SEQ ID NO: 48658 - DNA, 20 bp, Chlamydia trachomatis
aatgtgaatctcttattgaa

SEQ ID NO: 48659 - DNA, 20 bp, Chlamydia trachomatis
atgtgaatctcttattgaat

SEQ ID NO: 48660 - DNA, 20 bp, Chlamydia trachomatis
ttgaataggagagattttcg

SEQ ID NO: 48661 - DNA, 20 bp, Chlamydia trachomatis
aataggagagattttcgatt

SEQ ID NO: 48662 - DNA, 20 bp, Chlamydia trachomatis
tcgattggggccatctaagg

SEQ ID NO: 48663 - DNA, 20 bp, Chlamydia trachomatis
atgtgtctttttgaataaat

SEQ ID NO: 48664 - DNA, 20 bp, Chlamydia trachomatis
ttgaataaatacacagaaga

SEQ ID NO: 48665 - DNA, 20 bp, Chlamydia trachomatis
tgaataaatacacagaagat

SEQ ID NO: 48666 - DNA, 20 bp, Chlamydia trachomatis
gaataaatacacagaagatc

SEQ ID NO: 48667 - DNA, 20 bp, Chlamydia trachomatis
aataaatacacagaagatcg

SEQ ID NO: 48668 - DNA, 20 bp, Chlamydia trachomatis
tgcgattcggaagaagaggg

SEQ ID NO: 48669 - DNA, 20 bp, Chlamydia trachomatis
gcgattcggaagaagagggt

SEQ ID NO: 48670 - DNA, 20 bp, Chlamydia trachomatis
cgattcggaagaagagggta

SEQ ID NO: 48671 - DNA, 20 bp, Chlamydia trachomatis
ggaagaagagggtatgtgtt

SEQ ID NO: 48672 - DNA, 20 bp, Chlamydia trachomatis
tcctgtggaaattcggggga

SEQ ID NO: 48673 - DNA, 20 bp, Chlamydia trachomatis
ttggttctgtatatacagga

SEQ ID NO: 48674 - DNA, 20 bp, Chlamydia trachomatis
gttctgtatatacaggattt

SEQ ID NO: 48675 - DNA, 20 bp, Chlamydia trachomatis
tgtatatacaggatttttag

SEQ ID NO: 48676 - DNA, 20 bp, Chlamydia trachomatis
ttagctggatcctggttctt

SEQ ID NO: 48677 - DNA, 20 bp, Chlamydia trachomatis
tagctggatcctggttcttc

SEQ ID NO: 48678 - DNA, 20 bp, Chlamydia trachomatis
ggtgtgccgcgtatacaggg

SEQ ID NO: 48679 - DNA, 20 bp, Chlamydia trachomatis
cgagcttcctggttttcctc

SEQ ID NO: 48680 - DNA, 20 bp, Chlamydia trachomatis
ctggttttcctctcttaata

SEQ ID NO: 48681 - DNA, 20 bp, Chlamydia trachomatis
tcctctcttaatagcttgcc

SEQ ID NO: 48682 - DNA, 20 bp, Chlamydia trachomatis
cctctcttaatagcttgcct

SEQ ID NO: 48683 - DNA, 20 bp, Chlamydia trachomatis
ttgcgcactctccggaagac

SEQ ID NO: 48684 - DNA, 20 bp, Chlamydia trachomatis
cgcactctccggaagactta

SEQ ID NO: 48685 - DNA, 20 bp, Chlamydia trachomatis
ttagcagcagctgataagct

SEQ ID NO: 48686 - DNA, 20 bp, Chlamydia trachomatis
gcagcagctgataagctact

SEQ ID NO: 48687 - DNA, 20 bp, Chlamydia trachomatis
tcagctgctgctaataagtc

SEQ ID NO: 48688 - DNA, 20 bp, Chlamydia trachomatis
tcaggaaaatattcgtgacg

SEQ ID NO: 48689 - DNA, 20 bp, Chlamydia trachomatis
gtgacgtactagctaagcag

SEQ ID NO: 48690 - DNA, 20 bp, Chlamydia trachomatis
ggcctttcatacattgctct

SEQ ID NO: 48691 - DNA, 20 bp, Chlamydia trachomatis
catacattgctctagatgga

SEQ ID NO: 48692 - DNA, 20 bp, Chlamydia trachomatis
atacattgctctagatggaa

SEQ ID NO: 48693 - DNA, 20 bp, Chlamydia trachomatis
ttacacagggtattacaggg

SEQ ID NO: 48694 - DNA, 20 bp, Chlamydia trachomatis
cacagggtattacagggaaa

SEQ ID NO: 48695 - DNA, 20 bp, Chlamydia trachomatis
cagggaaagcagggtctttt

SEQ ID NO: 48696 - DNA, 20 bp, Chlamydia trachomatis
tcacactacacaatgtgtcg

SEQ ID NO: 48697 - DNA, 20 bp, Chlamydia trachomatis
cacactacacaatgtgtcgc

SEQ ID NO: 48698 - DNA, 20 bp, Chlamydia trachomatis
gctacttgttacaaattgga

SEQ ID NO: 48699 - DNA, 20 bp, Chlamydia trachomatis
ttacaaattggaaaaagtgt

SEQ ID NO: 48700 - DNA, 20 bp, Chlamydia trachomatis
caaattggaaaaagtgtacg

SEQ ID NO: 48701 - DNA, 20 bp, Chlamydia trachomatis
gaaaaagtgtacggagcttt

SEQ ID NO: 48702 - DNA, 20 bp, Chlamydia trachomatis
ggtgacggatgttgttaaag

SEQ ID NO: 48703 - DNA, 20 bp, Chlamydia trachomatis
ctccaaggaattcgtgatat

SEQ ID NO: 48704 - DNA, 20 bp, Chlamydia trachomatis
gtgatatggctgcgggagat

SEQ ID NO: 48705 - DNA, 20 bp, Chlamydia trachomatis
ctcagaagaggatgtgcatg

SEQ ID NO: 48706 - DNA, 20 bp, Chlamydia trachomatis
tcagaagaggatgtgcatga

SEQ ID NO: 48707 - DNA, 20 bp, Chlamydia trachomatis
cttcatgcacatcctcttct

SEQ ID NO: 48708 - DNA, 20 bp, Chlamydia trachomatis
ttcaggctttagaagcagct

SEQ ID NO: 48709 - DNA, 20 bp, Chlamydia trachomatis
tcaggctttagaagcagctt

SEQ ID NO: 48710 - DNA, 20 bp, Chlamydia trachomatis
caggctttagaagcagcttt

SEQ ID NO: 48711 - DNA, 20 bp, Chlamydia trachomatis
aggctttagaagcagctttt

SEQ ID NO: 48712 - DNA, 20 bp, Chlamydia trachomatis
agaagcagcttttcgagaca

SEQ ID NO: 48713 - DNA, 20 bp, Chlamydia trachomatis
cttgacgttgtatataagga

SEQ ID NO: 48714 - DNA, 20 bp, Chlamydia trachomatis
acgttgtatataaggaagcg

SEQ ID NO: 48715 - DNA, 20 bp, Chlamydia trachomatis
tatataaggaagcgttaggg

SEQ ID NO: 48716 - DNA, 20 bp, Chlamydia trachomatis
gggaaatcgaaatatgctga

SEQ ID NO: 48717 - DNA, 20 bp, Chlamydia trachomatis
agaacaagcacatcgcgatc

SEQ ID NO: 48718 - DNA, 20 bp, Chlamydia trachomatis
cgttcgataatcgttaagcg

SEQ ID NO: 48719 - DNA, 20 bp, Chlamydia trachomatis
gataatcgttaagcgagcaa

SEQ ID NO: 48720 - DNA, 20 bp, Chlamydia trachomatis
agcgagcaagagttgtggtt

SEQ ID NO: 48721 - DNA, 20 bp, Chlamydia trachomatis
tggttcgaatggtcgcatcg

SEQ ID NO: 48722 - DNA, 20 bp, Chlamydia trachomatis
gaatggtcgcatcgagcaaa

SEQ ID NO: 48723 - DNA, 20 bp, Chlamydia trachomatis
ttagcaaaaggacaaaacaa

SEQ ID NO: 48724 - DNA, 20 bp, Chlamydia trachomatis
gcaaaaggacaaaacaaagt

SEQ ID NO: 48725 - DNA, 20 bp, Chlamydia trachomatis
tgcggatgtagcagggatag

SEQ ID NO: 48726 - DNA, 20 bp, Chlamydia trachomatis
gcggatgtagcagggataga

SEQ ID NO: 48727 - DNA, 20 bp, Chlamydia trachomatis
cggatgtagcagggatagag

SEQ ID NO: 48728 - DNA, 20 bp, Chlamydia trachomatis
aactggcctttttcgttaat

SEQ ID NO: 48729 - DNA, 20 bp, Chlamydia trachomatis
ttcgttaatgctaaggagtt

SEQ ID NO: 48730 - DNA, 20 bp, Chlamydia trachomatis
tcgttaatgctaaggagttt

SEQ ID NO: 48731 - DNA, 20 bp, Chlamydia trachomatis
cgttaatgctaaggagttta

SEQ ID NO: 48732 - DNA, 20 bp, Chlamydia trachomatis
gttaatgctaaggagtttaa

SEQ ID NO: 48733 - DNA, 20 bp, Chlamydia trachomatis
cgatttttgaggtattgatc

SEQ ID NO: 48734 - DNA, 20 bp, Chlamydia trachomatis
ttgaggtattgatctgcata

SEQ ID NO: 48735 - DNA, 20 bp, Chlamydia trachomatis
tgaggtattgatctgcatag

SEQ ID NO: 48736 - DNA, 20 bp, Chlamydia trachomatis
gaggtattgatctgcatagt

SEQ ID NO: 48737 - DNA, 20 bp, Chlamydia trachomatis
aggtattgatctgcatagtt

SEQ ID NO: 48738 - DNA, 20 bp, Chlamydia trachomatis
agagccctgtctcatgtgtg

SEQ ID NO: 48739 - DNA, 20 bp, Chlamydia trachomatis
gagccctgtctcatgtgtgc

SEQ ID NO: 48740 - DNA, 20 bp, Chlamydia trachomatis
agttagcacgtattcctaga

SEQ ID NO: 48741 - DNA, 20 bp, Chlamydia trachomatis
gcacgtattcctagaattgt

SEQ ID NO: 48742 - DNA, 20 bp, Chlamydia trachomatis
ctagaattgtttggggggct

SEQ ID NO: 48743 - DNA, 20 bp, Chlamydia trachomatis
aactttctggtccgaagaaa

SEQ ID NO: 48744 - DNA, 20 bp, Chlamydia trachomatis
ctggtccgaagaaagcttgg

SEQ ID NO: 48745 - DNA, 20 bp, Chlamydia trachomatis
tggtccgaagaaagcttggg

SEQ ID NO: 48746 - DNA, 20 bp, Chlamydia trachomatis
ggtgcttccaattaaccata

SEQ ID NO: 48747 - DNA, 20 bp, Chlamydia trachomatis
caattaaccatagaaaggcc

SEQ ID NO: 48748 - DNA, 20 bp, Chlamydia trachomatis
ctttataaaagaggatgaaa

SEQ ID NO: 48749 - DNA, 20 bp, Chlamydia trachomatis
ataaaagaggatgaaatcca

SEQ ID NO: 48750 - DNA, 20 bp, Chlamydia trachomatis
taaaagaggatgaaatccaa

SEQ ID NO: 48751 - DNA, 20 bp, Chlamydia trachomatis
cgcatgagtaggcgttgcgt

SEQ ID NO: 48752 - DNA, 20 bp, Chlamydia trachomatis
cgtgatctcaaggctgcgaa

SEQ ID NO: 48753 - DNA, 20 bp, Chlamydia trachomatis
tttggggtcaggacctcgtt

SEQ ID NO: 48754 - DNA, 20 bp, Chlamydia trachomatis
ttggggtcaggacctcgttg

SEQ ID NO: 48755 - DNA, 20 bp, Chlamydia trachomatis
tggggtcaggacctcgttgt

SEQ ID NO: 48756 - DNA, 20 bp, Chlamydia trachomatis
ggggtcaggacctcgttgtg

SEQ ID NO: 48757 - DNA, 20 bp, Chlamydia trachomatis
gggtcaggacctcgttgtgg

SEQ ID NO: 48758 - DNA, 20 bp, Chlamydia trachomatis
aataaaagtgcctagtccgg

SEQ ID NO: 48759 - DNA, 20 bp, Chlamydia trachomatis
ataaaagtgcctagtccggc

SEQ ID NO: 48760 - DNA, 20 bp, Chlamydia trachomatis
actatcacattgatggctgg

SEQ ID NO: 48761 - DNA, 20 bp, Chlamydia trachomatis
ctatcacattgatggctggg

SEQ ID NO: 48762 - DNA, 20 bp, Chlamydia trachomatis
atggctgggatcttcctcat

SEQ ID NO: 48763 - DNA, 20 bp, Chlamydia trachomatis
gcgtttttcatcaccaattc

SEQ ID NO: 48764 - DNA, 20 bp, Chlamydia trachomatis
ttcatcaccaattcgcgatc

SEQ ID NO: 48765 - DNA, 20 bp, Chlamydia trachomatis
tcatcaccaattcgcgatcg

SEQ ID NO: 48766 - DNA, 20 bp, Chlamydia trachomatis
catcaccaattcgcgatcgg

SEQ ID NO: 48767 - DNA, 20 bp, Chlamydia trachomatis
atcaccaattcgcgatcggt

SEQ ID NO: 48768 - DNA, 20 bp, Chlamydia trachomatis
gattcactctcctcatggtg

SEQ ID NO: 48769 - DNA, 20 bp, Chlamydia trachomatis
actctcctcatggtgagggg

SEQ ID NO: 48770 - DNA, 20 bp, Chlamydia trachomatis
gcgtatgccgcatattttaa

SEQ ID NO: 48771 - DNA, 20 bp, Chlamydia trachomatis
cgtatgccgcatattttaac

SEQ ID NO: 48772 - DNA, 20 bp, Chlamydia trachomatis
taacgcgtatcgatatttct

SEQ ID NO: 48773 - DNA, 20 bp, Chlamydia trachomatis
ctgaaggtgtaggagatttg

SEQ ID NO: 48774 - DNA, 20 bp, Chlamydia trachomatis
ggctaccatagctccttcta

SEQ ID NO: 48775 - DNA, 20 bp, Chlamydia trachomatis
gctaccatagctccttctat

SEQ ID NO: 48776 - DNA, 20 bp, Chlamydia trachomatis
tatcagggctccacagttac

SEQ ID NO: 48777 - DNA, 20 bp, Chlamydia trachomatis
cagaaatcgatgagaagctt

SEQ ID NO: 48778 - DNA, 20 bp, Chlamydia trachomatis
cagcgactcccatttctatc

SEQ ID NO: 48779 - DNA, 20 bp, Chlamydia trachomatis
gatagaaatgggagtcgctg

SEQ ID NO: 48780 - DNA, 20 bp, Chlamydia trachomatis
gaggtggcatcctttcctgg

SEQ ID NO: 48781 - DNA, 20 bp, Chlamydia trachomatis
cctggtgttcccttttcgca

SEQ ID NO: 48782 - DNA, 20 bp, Chlamydia trachomatis
ctggtgttcccttttcgcag

SEQ ID NO: 48783 - DNA, 20 bp, Chlamydia trachomatis
tactacttgtgcttgatgga

SEQ ID NO: 48784 - DNA, 20 bp, Chlamydia trachomatis
tgcttgatggagtttggccg

SEQ ID NO: 48785 - DNA, 20 bp, Chlamydia trachomatis
atggagtttggccggtacca

SEQ ID NO: 48786 - DNA, 20 bp, Chlamydia trachomatis
ggccggtaccagtattttgg

SEQ ID NO: 48787 - DNA, 20 bp, Chlamydia trachomatis
gccggtaccagtattttggg

SEQ ID NO: 48788 - DNA, 20 bp, Chlamydia trachomatis
gatggagagggagtagtttt

SEQ ID NO: 48789 - DNA, 20 bp, Chlamydia trachomatis
atggagagggagtagttttc

SEQ ID NO: 48790 - DNA, 20 bp, Chlamydia trachomatis
tctttagtagcaatgtagct

SEQ ID NO: 48791 - DNA, 20 bp, Chlamydia trachomatis
ctttagtagcaatgtagctg

SEQ ID NO: 48792 - DNA, 20 bp, Chlamydia trachomatis
tttagtagcaatgtagctgc

SEQ ID NO: 48793 - DNA, 20 bp, Chlamydia trachomatis
caaatagtttatggggatcc

SEQ ID NO: 48794 - DNA, 20 bp, Chlamydia trachomatis
atggggatccattttagata

SEQ ID NO: 48795 - DNA, 20 bp, Chlamydia trachomatis
tggggatccattttagatat

SEQ ID NO: 48796 - DNA, 20 bp, Chlamydia trachomatis
tagatatacgatctgcgcat

SEQ ID NO: 48797 - DNA, 20 bp, Chlamydia trachomatis
agatatacgatctgcgcatt

SEQ ID NO: 48798 - DNA, 20 bp, Chlamydia trachomatis
atccgtgctagctacgggtt

SEQ ID NO: 48799 - DNA, 20 bp, Chlamydia trachomatis
tccgtgctagctacgggttt

SEQ ID NO: 48800 - DNA, 20 bp, Chlamydia trachomatis
gggaaccagcatatgaaaac

SEQ ID NO: 48801 - DNA, 20 bp, Chlamydia trachomatis
ggaaccagcatatgaaaacc

SEQ ID NO: 48802 - DNA, 20 bp, Chlamydia trachomatis
gcagaggagagcgatgttcg

SEQ ID NO: 48803 - DNA, 20 bp, Chlamydia trachomatis
tatgatcctgtagtacaaaa

SEQ ID NO: 48804 - DNA, 20 bp, Chlamydia trachomatis
atgatcctgtagtacaaaat

SEQ ID NO: 48805 - DNA, 20 bp, Chlamydia trachomatis
tgatcctgtagtacaaaata

SEQ ID NO: 48806 - DNA, 20 bp, Chlamydia trachomatis
agcagcgggtgcatcgacac

SEQ ID NO: 48807 - DNA, 20 bp, Chlamydia trachomatis
ttcttctatgcctggtgctg

SEQ ID NO: 48808 - DNA, 20 bp, Chlamydia trachomatis
tgttttctaacggaatcgag

SEQ ID NO: 48809 - DNA, 20 bp, Chlamydia trachomatis
gttttctaacggaatcgagg

SEQ ID NO: 48810 - DNA, 20 bp, Chlamydia trachomatis
ttttctaacggaatcgaggt

SEQ ID NO: 48811 - DNA, 20 bp, Chlamydia trachomatis
tctaacggaatcgaggtgaa

SEQ ID NO: 48812 - DNA, 20 bp, Chlamydia trachomatis
ctaacggaatcgaggtgaat

SEQ ID NO: 48813 - DNA, 20 bp, Chlamydia trachomatis
cgagacaaagtcgggatctg

SEQ ID NO: 48814 - DNA, 20 bp, Chlamydia trachomatis
gagacaaagtcgggatctgt

SEQ ID NO: 48815 - DNA, 20 bp, Chlamydia trachomatis
cagatgcggttgctctgaaa

SEQ ID NO: 48816 - DNA, 20 bp, Chlamydia trachomatis
ctctgaaacacttctgtcgg

SEQ ID NO: 48817 - DNA, 20 bp, Chlamydia trachomatis
tgtcggagaacttaaatgtg

SEQ ID NO: 48818 - DNA, 20 bp, Influenza A virus
atggaattggacgattctac

SEQ ID NO: 48819 - DNA, 20 bp, Influenza A virus
gacgattctacatccaaatg

SEQ ID NO: 48820 - DNA, 20 bp, Influenza A virus
tacatccaaatgtgcaccga

SEQ ID NO: 48821 - DNA, 20 bp, Influenza A virus
aagttcggtgcacatttgga

SEQ ID NO: 48822 - DNA, 20 bp, Influenza A virus
agttcggtgcacatttggat

SEQ ID NO: 48823 - DNA, 20 bp, Influenza A virus
atgacaaagaagaaataagg

SEQ ID NO: 48824 - DNA, 20 bp, Influenza A virus
tgacaaagaagaaataaggc

SEQ ID NO: 48825 - DNA, 20 bp, Influenza A virus
catcatcaccattattggct

SEQ ID NO: 48826 - DNA, 20 bp, Influenza A virus
ttggcttggcgccagattcg

SEQ ID NO: 48827 - DNA, 20 bp, Influenza A virus
gcttggcgccagattcgcct

SEQ ID NO: 48828 - DNA, 20 bp, Influenza A virus
atcaggatgatcaaacgtgg

SEQ ID NO: 48829 - DNA, 20 bp, Influenza A virus
tggagaggtgagaatggacg

SEQ ID NO: 48830 - DNA, 20 bp, Influenza A virus
tctcgtaagcactccttgtt

SEQ ID NO: 48831 - DNA, 20 bp, Influenza A virus
ttttccgtccattctcacct

SEQ ID NO: 48832 - DNA, 20 bp, Influenza A virus
tccgtccattctcacctctc

SEQ ID NO: 48833 - DNA, 20 bp, Influenza A virus
aactaagaagcaggtactgg

SEQ ID NO: 48834 - DNA, 20 bp, Influenza A virus
attagtgtttcctccacttc

SEQ ID NO: 48835 - DNA, 20 bp, Influenza A virus
gtgtttcctccacttctggt

SEQ ID NO: 48836 - DNA, 20 bp, Influenza A virus
cctccacttctggtccttat

SEQ ID NO: 48837 - DNA, 20 bp, Influenza A virus
ctccacttctggtccttatg

SEQ ID NO: 48838 - DNA, 20 bp, Influenza A virus
caagggggatgtgtttgtca

SEQ ID NO: 48839 - DNA, 20 bp, Influenza A virus
gtcataagggaaccattcat

SEQ ID NO: 48840 - DNA, 20 bp, Influenza A virus
tcataagggaaccattcata

SEQ ID NO: 48841 - DNA, 20 bp, Influenza A virus
atatcatgctcccccttgga

SEQ ID NO: 48842 - DNA, 20 bp, Influenza A virus
caagggggagcatgatatga

SEQ ID NO: 48843 - DNA, 20 bp, Influenza A virus
gctaacaattggaatttctg

SEQ ID NO: 48844 - DNA, 20 bp, Influenza A virus
gaatttctggcccagacaat

SEQ ID NO: 48845 - DNA, 20 bp, Influenza A virus
ctggcccagacaatggggca

SEQ ID NO: 48846 - DNA, 20 bp, Influenza A virus
tggcccagacaatggggcag

SEQ ID NO: 48847 - DNA, 20 bp, Influenza A virus
aagtacaacggcataataac

SEQ ID NO: 48848 - DNA, 20 bp, Influenza A virus
tcactatgaggaatgctcct

SEQ ID NO: 48849 - DNA, 20 bp, Influenza A virus
tcctgattctagtgaaatca

SEQ ID NO: 48850 - DNA, 20 bp, Influenza A virus
tagtgaaatcacatgtgtgt

SEQ ID NO: 48851 - DNA, 20 bp, Influenza A virus
gagccatgccagttatccct

SEQ ID NO: 48852 - DNA, 20 bp, Influenza A virus
tccctgcacacacatgtgat

SEQ ID NO: 48853 - DNA, 20 bp, Influenza A virus
aaatacggcaatggtgtttg

SEQ ID NO: 48854 - DNA, 20 bp, Influenza A virus
ggatagggagaactaaaagc

SEQ ID NO: 48855 - DNA, 20 bp, Influenza A virus
gatagggagaactaaaagca

SEQ ID NO: 48856 - DNA, 20 bp, Influenza A virus
gttcaagaaacggttttgag

SEQ ID NO: 48857 - DNA, 20 bp, Influenza A virus
aagaaacggttttgagatga

SEQ ID NO: 48858 - DNA, 20 bp, Influenza A virus
ttttcaaatgcatttatcgc

SEQ ID NO: 48859 - DNA, 20 bp, Influenza A virus
tttcaaatgcatttatcgct

SEQ ID NO: 48860 - DNA, 20 bp, Influenza A virus
ttcaaatgcatttatcgctt

SEQ ID NO: 48861 - DNA, 20 bp, Influenza A virus
tcaaatgcatttatcgcttc

SEQ ID NO: 48862 - DNA, 20 bp, Influenza A virus
caaatgcatttatcgcttct

SEQ ID NO: 48863 - DNA, 20 bp, Influenza C virus
aaaagcaagtgaacagtagc

SEQ ID NO: 48864 - DNA, 20 bp, Influenza C virus
agcctacacaatggcttcgg

SEQ ID NO: 48865 - DNA, 20 bp, Influenza C virus
ggaggaaatttgtatgccac

SEQ ID NO: 48866 - DNA, 20 bp, Influenza C virus
gtatgccacggaagaaaaaa

SEQ ID NO: 48867 - DNA, 20 bp, Influenza C virus
tatgccacggaagaaaaaag

SEQ ID NO: 48868 - DNA, 20 bp, Influenza C virus
atgttgagtatgtttggacc

SEQ ID NO: 48869 - DNA, 20 bp, Influenza C virus
agtatgtttggaccacctgg

SEQ ID NO: 48870 - DNA, 20 bp, Influenza C virus
ggaccacctgggaaggtaga

SEQ ID NO: 48871 - DNA, 20 bp, Influenza C virus
gaccacctgggaaggtagac

SEQ ID NO: 48872 - DNA, 20 bp, Influenza C virus
accaaggatgtggaaaacat

SEQ ID NO: 48873 - DNA, 20 bp, Influenza C virus
ctttacaagcgactgcaggg

SEQ ID NO: 48874 - DNA, 20 bp, Influenza C virus
acaagcgactgcaggggttg

SEQ ID NO: 48875 - DNA, 20 bp, Influenza C virus
caagcgactgcaggggttgc

SEQ ID NO: 48876 - DNA, 20 bp, Influenza C virus
caaaaaattgcaacaacagc

SEQ ID NO: 48877 - DNA, 20 bp, Influenza C virus
caacaacagcttcttaaaaa

SEQ ID NO: 48878 - DNA, 20 bp, Influenza C virus
atctggaaaagttgttggag

SEQ ID NO: 48879 - DNA, 20 bp, Influenza C virus
ttggaggactagataacagg

SEQ ID NO: 48880 - DNA, 20 bp, Influenza C virus
gaggactagataacagggta

SEQ ID NO: 48881 - DNA, 20 bp, Influenza C virus
cacagggaattctggagaca

SEQ ID NO: 48882 - DNA, 20 bp, Influenza C virus
tggagacaccccaacaatgc

SEQ ID NO: 48883 - DNA, 20 bp, Influenza C virus
ctgtcaggactggactatga

SEQ ID NO: 48884 - DNA, 20 bp, Influenza C virus
attcacccaccctgattgtg

SEQ ID NO: 48885 - DNA, 20 bp, Influenza C virus
acccaccctgattgtgatat

SEQ ID NO: 48886 - DNA, 20 bp, Influenza C virus
tgatatgcatctagcttcat

SEQ ID NO: 48887 - DNA, 20 bp, Influenza C virus
atagtccagtcctgacagca

SEQ ID NO: 48888 - DNA, 20 bp, Influenza C virus
taattcccaccagtggaact

SEQ ID NO: 48889 - DNA, 20 bp, Influenza C virus
ccaccagtggaactgatacc

SEQ ID NO: 48890 - DNA, 20 bp, Influenza C virus
ttggaatcgatgacctcatt

SEQ ID NO: 48891 - DNA, 20 bp, Influenza C virus
tggaatcgatgacctcatta

SEQ ID NO: 48892 - DNA, 20 bp, Influenza C virus
ggaatcgatgacctcattat

SEQ ID NO: 48893 - DNA, 20 bp, Influenza C virus
agaaattgaaaatgcaagat

SEQ ID NO: 48894 - DNA, 20 bp, Influenza C virus
gaaattgaaaatgcaagatc

SEQ ID NO: 48895 - DNA, 20 bp, Influenza C virus
aaaatgcaagatctgaagct

SEQ ID NO: 48896 - DNA, 20 bp, Influenza C virus
gttaggagaattgggaataa

SEQ ID NO: 48897 - DNA, 20 bp, Influenza C virus
ttaggagaattgggaataat

SEQ ID NO: 48898 - DNA, 20 bp, Influenza C virus
caaccattccccctcttgac

SEQ ID NO: 48899 - DNA, 20 bp, Influenza C virus
cccctcttgacacaaaaatt

SEQ ID NO: 48900 - DNA, 20 bp, Influenza C virus
acacaaaaattgatctgcaa

SEQ ID NO: 48901 - DNA, 20 bp, Influenza C virus
atctgcaatcagatcctttt

SEQ ID NO: 48902 - DNA, 20 bp, Influenza C virus
ttactggggaagcagcttgg

SEQ ID NO: 48903 - DNA, 20 bp, Influenza A virus
catggggccaaggaggtgtc

SEQ ID NO: 48904 - DNA, 20 bp, Influenza A virus
aactggtgcacttgccagtt

SEQ ID NO: 48905 - DNA, 20 bp, Influenza A virus
ccagttgcatgggcctcata

SEQ ID NO: 48906 - DNA, 20 bp, Influenza A virus
catgggcctcatatacaaca

SEQ ID NO: 48907 - DNA, 20 bp, Influenza A virus
ccatcctgttgtatatgagg

SEQ ID NO: 48908 - DNA, 20 bp, Influenza A virus
ctaatcagactaggcagatg

SEQ ID NO: 48909 - DNA, 20 bp, Influenza A virus
ggactcatcctagctccagt

SEQ ID NO: 48910 - DNA, 20 bp, Influenza A virus
tcaagaaggtcatctttcag

SEQ ID NO: 48911 - DNA, 20 bp, Influenza A virus
caagaaggtcatctttcaga

SEQ ID NO: 48912 - DNA, 20 bp, Influenza A virus
aagaaggtcatctttcagac

SEQ ID NO: 48913 - DNA, 20 bp, Human papillomavirus type 92
taatacaaacagctagtata

SEQ ID NO: 48914 - DNA, 20 bp, Human papillomavirus type 92
ccatcacaatggcaaaacct

SEQ ID NO: 48915 - DNA, 20 bp, Human papillomavirus type 92
taagttcctgcaccgaagga

SEQ ID NO: 48916 - DNA, 20 bp, Human papillomavirus type 92
ctgcaccgaaggaggttttg

SEQ ID NO: 48917 - DNA, 20 bp, Human papillomavirus type 92
tgccattgtgatgggaacac

SEQ ID NO: 48918 - DNA, 20 bp, Human papillomavirus type 92
tgctggatctgcaagacctt

SEQ ID NO: 48919 - DNA, 20 bp, Human papillomavirus type 92
tccagcccattgacctgcat

SEQ ID NO: 48920 - DNA, 20 bp, Human papillomavirus type 92
acctgcattgtgacgaagac

SEQ ID NO: 48921 - DNA, 20 bp, Human papillomavirus type 92
tgacgaagacttgtcagaaa

SEQ ID NO: 48922 - DNA, 20 bp, Human papillomavirus type 92
tcagaaaatcaggaggagga

SEQ ID NO: 48923 - DNA, 20 bp, Human papillomavirus type 92
gtgtttaatagaagctgatt

SEQ ID NO: 48924 - DNA, 20 bp, Human papillomavirus type 92
aatagaagctgattgtagtg

SEQ ID NO: 48925 - DNA, 20 bp, Human papillomavirus type 92
atagaagctgattgtagtga

SEQ ID NO: 48926 - DNA, 20 bp, Human papillomavirus type 92
tagtgatgtagatggggatt

SEQ ID NO: 48927 - DNA, 20 bp, Human papillomavirus type 92
tgaaaagttatttgacaaag

SEQ ID NO: 48928 - DNA, 20 bp, Human papillomavirus type 92
tacagcttagtccacaattg

SEQ ID NO: 48929 - DNA, 20 bp, Human papillomavirus type 92
acagcttagtccacaattgg

SEQ ID NO: 48930 - DNA, 20 bp, Human papillomavirus type 92
cagcttagtccacaattgga

SEQ ID NO: 48931 - DNA, 20 bp, Human papillomavirus type 92
gtccacaattggaatctatt

SEQ ID NO: 48932 - DNA, 20 bp, Human papillomavirus type 92
gaatctattactatttcgcc

SEQ ID NO: 48933 - DNA, 20 bp, Human papillomavirus type 92
tagctgatccaccccagatt

SEQ ID NO: 48934 - DNA, 20 bp, Human papillomavirus type 92
gcagcgtagtagcagctttg

SEQ ID NO: 48935 - DNA, 20 bp, Human papillomavirus type 92
gttttggtacaaagaatcta

SEQ ID NO: 48936 - DNA, 20 bp, Human papillomavirus type 92
ttttggtacaaagaatctat

SEQ ID NO: 48937 - DNA, 20 bp, Human papillomavirus type 92
tggtacaaagaatctatgaa

SEQ ID NO: 48938 - DNA, 20 bp, Human papillomavirus type 92
caatgcactgcaagacaagt

SEQ ID NO: 48939 - DNA, 20 bp, Human papillomavirus type 92
aatgcactgcaagacaagtt

SEQ ID NO: 48940 - DNA, 20 bp, Human papillomavirus type 92
atgacaatttatgaaagagc

SEQ ID NO: 48941 - DNA, 20 bp, Human papillomavirus type 92
atgaaagagctagtgaatcc

SEQ ID NO: 48942 - DNA, 20 bp, Human papillomavirus type 92
tgaaagagctagtgaatcct

SEQ ID NO: 48943 - DNA, 20 bp, Human papillomavirus type 92
aataaacaatactatatcag

SEQ ID NO: 48944 - DNA, 20 bp, Human papillomavirus type 92
gctcaagacgcacgcagatt

SEQ ID NO: 48945 - DNA, 20 bp, Human papillomavirus type 92
ctcaagacgcacgcagattt

SEQ ID NO: 48946 - DNA, 20 bp, Human papillomavirus type 92
agtgaaactggagaatggga

SEQ ID NO: 48947 - DNA, 20 bp, Human papillomavirus type 92
gtgaaactggagaatgggaa

SEQ ID NO: 48948 - DNA, 20 bp, Human papillomavirus type 92
cggtcgtctttggatccccc

SEQ ID NO: 48949 - DNA, 20 bp, Human papillomavirus type 92
ggtcgtctttggatccccct

SEQ ID NO: 48950 - DNA, 20 bp, Human papillomavirus type 92
ggatccccctggaggcggtt

SEQ ID NO: 48951 - DNA, 20 bp, Human papillomavirus type 92
gatccccctggaggcggttg

SEQ ID NO: 48952 - DNA, 20 bp, Human papillomavirus type 92
tagcaccagagtcttttcgc

SEQ ID NO: 48953 - DNA, 20 bp, Human papillomavirus type 92
ggatcttgacctcctgttgc

SEQ ID NO: 48954 - DNA, 20 bp, Human papillomavirus type 92
gatcttgacctcctgttgct

SEQ ID NO: 48955 - DNA, 20 bp, Human papillomavirus type 92
acctcctgttgctgtaccct

SEQ ID NO: 48956 - DNA, 20 bp, Human papillomavirus type 92
ctgtaccctctacggcctct

SEQ ID NO: 48957 - DNA, 20 bp, Human papillomavirus type 92
ccttccgttcctgctcctgc

SEQ ID NO: 48958 - DNA, 20 bp, Human papillomavirus type 92
tgattgcttcagtactacat

SEQ ID NO: 48959 - DNA, 20 bp, Human papillomavirus type 92
cttcagtactacatggtcat

SEQ ID NO: 48960 - DNA, 20 bp, Human papillomavirus type 92
agtactacatggtcatgggt

SEQ ID NO: 48961 - DNA, 20 bp, Human papillomavirus type 92
tagagcgtcctattctatcg

SEQ ID NO: 48962 - DNA, 20 bp, Human papillomavirus type 92
tatcgttgctacctgcactg

SEQ ID NO: 48963 - DNA, 20 bp, Human papillomavirus type 92
gaaatacacccacagttatt

SEQ ID NO: 48964 - DNA, 20 bp, Human papillomavirus type 92
ttaggcctgctttggtgcct

SEQ ID NO: 48965 - DNA, 20 bp, Human papillomavirus type 92
ggcctgctttggtgcctgag

SEQ ID NO: 48966 - DNA, 20 bp, Human papillomavirus type 92
ggtgcctgaggctataggac

SEQ ID NO: 48967 - DNA, 20 bp, Human papillomavirus type 92
gtgcctgaggctataggacc

SEQ ID NO: 48968 - DNA, 20 bp, Human papillomavirus type 92
gcagacttggcaaacgagct

SEQ ID NO: 48969 - DNA, 20 bp, Human papillomavirus type 92
gcaaacgagctactataagg

SEQ ID NO: 48970 - DNA, 20 bp, Human papillomavirus type 92
tagttccagacctggtcctt

SEQ ID NO: 48971 - DNA, 20 bp, Human papillomavirus type 92
cagacctggtccttatagta

SEQ ID NO: 48972 - DNA, 20 bp, Human papillomavirus type 92
tagtagctcgtttgccaagt

SEQ ID NO: 48973 - DNA, 20 bp, Human papillomavirus type 92
acacagaagattttagtggt

SEQ ID NO: 48974 - DNA, 20 bp, Human papillomavirus type 92
tagtggtgattattatctac

SEQ ID NO: 48975 - DNA, 20 bp, Human papillomavirus type 92
agtggtgattattatctaca

SEQ ID NO: 48976 - DNA, 20 bp, Human papillomavirus type 92
gtggtgattattatctacat

SEQ ID NO: 48977 - DNA, 20 bp, Human papillomavirus type 92
ttatctacatcctagcttaa

SEQ ID NO: 48978 - DNA, 20 bp, Human papillomavirus type 92
atccacatgatgtattagtg

SEQ ID NO: 48979 - DNA, 20 bp, Human papillomavirus type 92
gtgcctaaggtgtcagggaa

SEQ ID NO: 48980 - DNA, 20 bp, Human papillomavirus type 92
agagcttttcgactgaaatt

SEQ ID NO: 48981 - DNA, 20 bp, Human papillomavirus type 92
gagcttttcgactgaaatta

SEQ ID NO: 48982 - DNA, 20 bp, Human papillomavirus type 92
tcgactgaaattaccagatc

SEQ ID NO: 48983 - DNA, 20 bp, Human papillomavirus type 92
tgatccaaagcaaattcagt

SEQ ID NO: 48984 - DNA, 20 bp, Human papillomavirus type 92
gatccaaagcaaattcagtt

SEQ ID NO: 48985 - DNA, 20 bp, Human papillomavirus type 92
atccaaagcaaattcagtta

SEQ ID NO: 48986 - DNA, 20 bp, Human papillomavirus type 92
agttatttgttttaggatgt

SEQ ID NO: 48987 - DNA, 20 bp, Human papillomavirus type 92
tttgttttaggatgtacacc

SEQ ID NO: 48988 - DNA, 20 bp, Human papillomavirus type 92
ttaaagatgtcaaatgatgt

SEQ ID NO: 48989 - DNA, 20 bp, Human papillomavirus type 92
taaagatgtcaaatgatgta

SEQ ID NO: 48990 - DNA, 20 bp, Human papillomavirus type 92
aaagatgtcaaatgatgtat

SEQ ID NO: 48991 - DNA, 20 bp, Human papillomavirus type 92
aagatgtcaaatgatgtata

SEQ ID NO: 48992 - DNA, 20 bp, Human papillomavirus type 92
tttctatggacgacgagaac

SEQ ID NO: 48993 - DNA, 20 bp, Human papillomavirus type 92
cctactgttagtgggtcttt

SEQ ID NO: 48994 - DNA, 20 bp, Human papillomavirus type 92
gtgggtctttggtatccact

SEQ ID NO: 48995 - DNA, 20 bp, Human papillomavirus type 92
ggtatccactgatgcacaat

SEQ ID NO: 48996 - DNA, 20 bp, Human papillomavirus type 92
gtatccactgatgcacaatt

SEQ ID NO: 48997 - DNA, 20 bp, Human papillomavirus type 92
tttaatcggccatattggtt

SEQ ID NO: 48998 - DNA, 20 bp, Human coronavirus
tgggcgtagatttttcatag

SEQ ID NO: 48999 - DNA, 20 bp, Human coronavirus
ttcatagtggtgtttatatt

SEQ ID NO: 49000 - DNA, 20 bp, Human coronavirus
tcatagtggtgtttatattc

SEQ ID NO: 49001 - DNA, 20 bp, Human coronavirus
catagtggtgtttatattca

SEQ ID NO: 49002 - DNA, 20 bp, Human coronavirus
atagtggtgtttatattcat

SEQ ID NO: 49003 - DNA, 20 bp, Human coronavirus
tcgccgacttcttaaacaag

SEQ ID NO: 49004 - DNA, 20 bp, Human coronavirus
ttaaacaagagtgttgtgtg

SEQ ID NO: 49005 - DNA, 20 bp, Human coronavirus
aacaagagtgttgtgtgcag

SEQ ID NO: 49006 - DNA, 20 bp, Human coronavirus
tgtgcagtctagcctaatac

SEQ ID NO: 49007 - DNA, 20 bp, Human coronavirus
ttatgaatgcaagtccatat

SEQ ID NO: 49008 - DNA, 20 bp, Human coronavirus
gtgggttgggtcataccctt

SEQ ID NO: 49009 - DNA, 20 bp, Human coronavirus
ggtcatacccttagccttta

SEQ ID NO: 49010 - DNA, 20 bp, Human coronavirus
gcctttatgcctgtgcaatc

SEQ ID NO: 49011 - DNA, 20 bp, Human coronavirus
atgcctgtgcaatcccggaa

SEQ ID NO: 49012 - DNA, 20 bp, Human coronavirus
tgcctgtgcaatcccggaaa

SEQ ID NO: 49013 - DNA, 20 bp, Human coronavirus
ttgatgtaattgtggcatgg

SEQ ID NO: 49014 - DNA, 20 bp, Human coronavirus
tgatgtaattgtggcatggc

SEQ ID NO: 49015 - DNA, 20 bp, Human coronavirus
gatgtaattgtggcatggca

SEQ ID NO: 49016 - DNA, 20 bp, Human coronavirus
atgtaattgtggcatggcat

SEQ ID NO: 49017 - DNA, 20 bp, Human coronavirus
tggcatggcatgttgtgcgt

SEQ ID NO: 49018 - DNA, 20 bp, Human coronavirus
gttacattgattgcgaacaa

SEQ ID NO: 49019 - DNA, 20 bp, Human coronavirus
cattgattgcgaacaagact

SEQ ID NO: 49020 - DNA, 20 bp, Human coronavirus
attgcgaacaagactcgtgt

SEQ ID NO: 49021 - DNA, 20 bp, Human coronavirus
cgaacaagactcgtgtgatt

SEQ ID NO: 49022 - DNA, 20 bp, Human coronavirus
taaaggttggattcctggta

SEQ ID NO: 49023 - DNA, 20 bp, Human coronavirus
taaaggaaacaaatctcatt

SEQ ID NO: 49024 - DNA, 20 bp, Human coronavirus
gcaaagctttgtaccttgat

SEQ ID NO: 49025 - DNA, 20 bp, Human coronavirus
caaagctttgtaccttgatt

SEQ ID NO: 49026 - DNA, 20 bp, Human coronavirus
gtaccttgattatgttcaac

SEQ ID NO: 49027 - DNA, 20 bp, Human coronavirus
taccttgattatgttcaaca

SEQ ID NO: 49028 - DNA, 20 bp, Human coronavirus
ctaaagttgtactggactct

SEQ ID NO: 49029 - DNA, 20 bp, Human coronavirus
tactggactctttaagagtt

SEQ ID NO: 49030 - DNA, 20 bp, Human coronavirus
aagagttacttttattgatg

SEQ ID NO: 49031 - DNA, 20 bp, Human coronavirus
agagttacttttattgatgg

SEQ ID NO: 49032 - DNA, 20 bp, Human coronavirus
cttttattgatggcctttct

SEQ ID NO: 49033 - DNA, 20 bp, Human coronavirus
cagctaaaatttgcattgtg

SEQ ID NO: 49034 - DNA, 20 bp, Human coronavirus
gcattgtggataatgtttat

SEQ ID NO: 49035 - DNA, 20 bp, Human coronavirus
cattgtggataatgtttata

SEQ ID NO: 49036 - DNA, 20 bp, Human coronavirus
tggataatgtttatatggcc

SEQ ID NO: 49037 - DNA, 20 bp, Human coronavirus
atatggccaaggctggtgac

SEQ ID NO: 49038 - DNA, 20 bp, Human coronavirus
aggaaagtgatgttgaagaa

SEQ ID NO: 49039 - DNA, 20 bp, Human coronavirus
aagaagatgatgtagaaggt

SEQ ID NO: 49040 - DNA, 20 bp, Human coronavirus
aactgtcacaagtgctggac

SEQ ID NO: 49041 - DNA, 20 bp, Human coronavirus
actgtcacaagtgctggaca

SEQ ID NO: 49042 - DNA, 20 bp, Human coronavirus
actagcaacacaaggctgtc

SEQ ID NO: 49043 - DNA, 20 bp, Human coronavirus
ggtgttatacaagcaacagt

SEQ ID NO: 49044 - DNA, 20 bp, Human coronavirus
tacaagcaacagtatagtca

SEQ ID NO: 49045 - DNA, 20 bp, Human coronavirus
tttgttgataccttggttaa

SEQ ID NO: 49046 - DNA, 20 bp, Human coronavirus
gttgataccttggttaataa

SEQ ID NO: 49047 - DNA, 20 bp, Human coronavirus
ttgataccttggttaataag

SEQ ID NO: 49048 - DNA, 20 bp, Human coronavirus
gtgctactggagattgttat

SEQ ID NO: 49049 - DNA, 20 bp, Human coronavirus
tgctactggagattgttatg

SEQ ID NO: 49050 - DNA, 20 bp, Human coronavirus
ttatgtctctacagggggca

SEQ ID NO: 49051 - DNA, 20 bp, Human coronavirus
tgtctctacagggggcaaat

SEQ ID NO: 49052 - DNA, 20 bp, Human coronavirus
tgtaaaactgtgcttaatgt

SEQ ID NO: 49053 - DNA, 20 bp, Human coronavirus
cttttaatgttggacgttcc

SEQ ID NO: 49054 - DNA, 20 bp, Human coronavirus
ttttaatgttggacgttcca

SEQ ID NO: 49055 - DNA, 20 bp, Human coronavirus
taatgttggacgttccattg

SEQ ID NO: 49056 - DNA, 20 bp, Human coronavirus
aatgttggacgttccattgt

SEQ ID NO: 49057 - DNA, 20 bp, Human coronavirus
atgttggacgttccattgtt

SEQ ID NO: 49058 - DNA, 20 bp, Human coronavirus
ctaactgttgatggtgttaa

SEQ ID NO: 49059 - DNA, 20 bp, Human coronavirus
atggtgttaatttcactaat

SEQ ID NO: 49060 - DNA, 20 bp, Human coronavirus
atttcactaataggtttgtg

SEQ ID NO: 49061 - DNA, 20 bp, Human coronavirus
cactaataggtttgtgcctg

SEQ ID NO: 49062 - DNA, 20 bp, Human coronavirus
actaataggtttgtgcctgt

SEQ ID NO: 49063 - DNA, 20 bp, Human coronavirus
cacttttaagcaagctaata

SEQ ID NO: 49064 - DNA, 20 bp, Human coronavirus
acttttaagcaagctaataa

SEQ ID NO: 49065 - DNA, 20 bp, Human coronavirus
taagcaagctaataacaatt

SEQ ID NO: 49066 - DNA, 20 bp, Human coronavirus
aagcaagctaataacaattg

SEQ ID NO: 49067 - DNA, 20 bp, Human coronavirus
agcaagctaataacaattgt

SEQ ID NO: 49068 - DNA, 20 bp, Human coronavirus
tgcattttggtacattgagt

SEQ ID NO: 49069 - DNA, 20 bp, Human coronavirus
tggtacattgagtcgtgaag

SEQ ID NO: 49070 - DNA, 20 bp, Human coronavirus
ggtacattgagtcgtgaaga

SEQ ID NO: 49071 - DNA, 20 bp, Human coronavirus
gtacattgagtcgtgaagat

SEQ ID NO: 49072 - DNA, 20 bp, Human coronavirus
agtcgtgaagatcttgagat

SEQ ID NO: 49073 - DNA, 20 bp, Human coronavirus
tactcagcgtattattaaag

SEQ ID NO: 49074 - DNA, 20 bp, Human coronavirus
ttaaagcccaatttaaaaca

SEQ ID NO: 49075 - DNA, 20 bp, Human coronavirus
aagcccaatttaaaacattc

SEQ ID NO: 49076 - DNA, 20 bp, Human coronavirus
aaaacattcgagaaagtaga

SEQ ID NO: 49077 - DNA, 20 bp, Human coronavirus
aaacattcgagaaagtagat

SEQ ID NO: 49078 - DNA, 20 bp, Human coronavirus
gatgttttaaaagtggatga

SEQ ID NO: 49079 - DNA, 20 bp, Human coronavirus
atgttttaaaagtggatgat

SEQ ID NO: 49080 - DNA, 20 bp, Human coronavirus
taaaagtggatgatgttgac

SEQ ID NO: 49081 - DNA, 20 bp, Human coronavirus
aaaagtggatgatgttgacg

SEQ ID NO: 49082 - DNA, 20 bp, Human coronavirus
aaagtggatgatgttgacga

SEQ ID NO: 49083 - DNA, 20 bp, Human coronavirus
accacttggctgcctgagct

SEQ ID NO: 49084 - DNA, 20 bp, Human coronavirus
gctgcctgagctttttatgc

SEQ ID NO: 49085 - DNA, 20 bp, Human coronavirus
ttatgcttagtacattacat

SEQ ID NO: 49086 - DNA, 20 bp, Human coronavirus
tatgcttagtacattacatt

SEQ ID NO: 49087 - DNA, 20 bp, Human coronavirus
atgcttagtacattacattg

SEQ ID NO: 49088 - DNA, 20 bp, Human coronavirus
cattgattgtgattcttata

SEQ ID NO: 49089 - DNA, 20 bp, Human coronavirus
attgtgattcttataaacca

SEQ ID NO: 49090 - DNA, 20 bp, Human coronavirus
tgattcttataaaccaggta

SEQ ID NO: 49091 - DNA, 20 bp, Human coronavirus
ttataaaccaggtaatactt

SEQ ID NO: 49092 - DNA, 20 bp, Human coronavirus
taaaccaggtaatactttta

SEQ ID NO: 49093 - DNA, 20 bp, Human coronavirus
ctaaaatagctggtgtttcc

SEQ ID NO: 49094 - DNA, 20 bp, Human coronavirus
cctgtatatggtctgtggat

SEQ ID NO: 49095 - DNA, 20 bp, Human coronavirus
ctgtatatggtctgtggatg

SEQ ID NO: 49096 - DNA, 20 bp, Human coronavirus
taatcagtttagttctgatt

SEQ ID NO: 49097 - DNA, 20 bp, Human coronavirus
aatcagtttagttctgattt

SEQ ID NO: 49098 - DNA, 20 bp, Human coronavirus
gctctacagtgtttaatgtc

SEQ ID NO: 49099 - DNA, 20 bp, Human coronavirus
aatgtccctaccaaagtgtt

SEQ ID NO: 49100 - DNA, 20 bp, Human coronavirus
atgtccctaccaaagtgtta

SEQ ID NO: 49101 - DNA, 20 bp, Human coronavirus
cgatatggttatcatgtgtt

SEQ ID NO: 49102 - DNA, 20 bp, Human coronavirus
tcatgtgttgcactttatta

SEQ ID NO: 49103 - DNA, 20 bp, Human coronavirus
tccagaagtgttgcgagaag

SEQ ID NO: 49104 - DNA, 20 bp, Human coronavirus
ccagaagtgttgcgagaagg

SEQ ID NO: 49105 - DNA, 20 bp, Human coronavirus
cagaagtgttgcgagaaggg

SEQ ID NO: 49106 - DNA, 20 bp, Human coronavirus
cgagaagggcttgtacgtat

SEQ ID NO: 49107 - DNA, 20 bp, Human coronavirus
tacgtatcgtgcgtactcgt

SEQ ID NO: 49108 - DNA, 20 bp, Human coronavirus
actgctagttccattgctgg

SEQ ID NO: 49109 - DNA, 20 bp, Human coronavirus
cattgctggtgctatactcg

SEQ ID NO: 49110 - DNA, 20 bp, Human coronavirus
ctggtgctatactcgctgta

SEQ ID NO: 49111 - DNA, 20 bp, Human coronavirus
ttgttttggtgttttattac

SEQ ID NO: 49112 - DNA, 20 bp, Human coronavirus
ttttggtgttttattaccta

SEQ ID NO: 49113 - DNA, 20 bp, Human coronavirus
ctctcagttggctaaagcaa

SEQ ID NO: 49114 - DNA, 20 bp, Human coronavirus
gctaaagcaatggacacatt

SEQ ID NO: 49115 - DNA, 20 bp, Human coronavirus
accaataataatggtagtga

SEQ ID NO: 49116 - DNA, 20 bp, Human coronavirus
ccaataataatggtagtgat

SEQ ID NO: 49117 - DNA, 20 bp, Human coronavirus
accaaccgcctactgcttcc

SEQ ID NO: 49118 - DNA, 20 bp, Human coronavirus
catgtaactatgcgtagtag

SEQ ID NO: 49119 - DNA, 20 bp, Human coronavirus
atgtaactatgcgtagtagt

SEQ ID NO: 49120 - DNA, 20 bp, Human coronavirus
taccattaagggttcctttt

SEQ ID NO: 49121 - DNA, 20 bp, Human coronavirus
agggttcctttttatgcgga

SEQ ID NO: 49122 - DNA, 20 bp, Human coronavirus
ctttttatgcggatcttgtg

SEQ ID NO: 49123 - DNA, 20 bp, Human coronavirus
agccaagttaaatctgacct

SEQ ID NO: 49124 - DNA, 20 bp, Human coronavirus
gccaagttaaatctgacctt

SEQ ID NO: 49125 - DNA, 20 bp, Human coronavirus
aatctgaccttgttatagat

SEQ ID NO: 49126 - DNA, 20 bp, Human coronavirus
ttatagatgctttagcttct

SEQ ID NO: 49127 - DNA, 20 bp, Human coronavirus
tagatgctttagcttctatg

SEQ ID NO: 49128 - DNA, 20 bp, Human coronavirus
ttggttaagcataagcatct

SEQ ID NO: 49129 - DNA, 20 bp, Human coronavirus
gttaagcataagcatcttta

SEQ ID NO: 49130 - DNA, 20 bp, Human coronavirus
agcataagcatctttatttg

SEQ ID NO: 49131 - DNA, 20 bp, Human coronavirus
atttgactatgtatataact

SEQ ID NO: 49132 - DNA, 20 bp, Human coronavirus
tttgactatgtatataactc

SEQ ID NO: 49133 - DNA, 20 bp, Human coronavirus
ttcttatgttggcttccctt

SEQ ID NO: 49134 - DNA, 20 bp, Human coronavirus
ttatgttggcttcccttttt

SEQ ID NO: 49135 - DNA, 20 bp, Human coronavirus
tgttggcttccctttttggt

SEQ ID NO: 49136 - DNA, 20 bp, Human coronavirus
gcttccctttttggtactta

SEQ ID NO: 49137 - DNA, 20 bp, Human coronavirus
cctttttggtacttacacat

SEQ ID NO: 49138 - DNA, 20 bp, Human coronavirus
tgcttaattttaagctgttg

SEQ ID NO: 49139 - DNA, 20 bp, Human coronavirus
attttaagctgttgggtatt

SEQ ID NO: 49140 - DNA, 20 bp, Human coronavirus
taagctgttgggtattggag

SEQ ID NO: 49141 - DNA, 20 bp, Human coronavirus
aagctgttgggtattggagg

SEQ ID NO: 49142 - DNA, 20 bp, Human coronavirus
agctgttgggtattggaggt

SEQ ID NO: 49143 - DNA, 20 bp, Human coronavirus
tgcaggctttacagagtgaa

SEQ ID NO: 49144 - DNA, 20 bp, Human coronavirus
gcaggctttacagagtgaat

SEQ ID NO: 49145 - DNA, 20 bp, Human coronavirus
caggctttacagagtgaatt

SEQ ID NO: 49146 - DNA, 20 bp, Human coronavirus
acagagtgaatttgttaata

SEQ ID NO: 49147 - DNA, 20 bp, Human coronavirus
cagagtgaatttgttaatat

SEQ ID NO: 49148 - DNA, 20 bp, Human coronavirus
taccagataaaagtgtttat

SEQ ID NO: 49149 - DNA, 20 bp, Human coronavirus
atgaccaggtagttgataat

SEQ ID NO: 49150 - DNA, 20 bp, Human coronavirus
tgaccaggtagttgataatg

SEQ ID NO: 49151 - DNA, 20 bp, Human coronavirus
ataatgtctatgttacctat

SEQ ID NO: 49152 - DNA, 20 bp, Human coronavirus
cctatgcgggtaatgtatgg

SEQ ID NO: 49153 - DNA, 20 bp, Human coronavirus
ttggtacaatttcttctaca

SEQ ID NO: 49154 - DNA, 20 bp, Human coronavirus
gtacaatttcttctacagtt

SEQ ID NO: 49155 - DNA, 20 bp, Human coronavirus
cttctacagttagattgcaa

SEQ ID NO: 49156 - DNA, 20 bp, Human coronavirus
ttctacagttagattgcaag

SEQ ID NO: 49157 - DNA, 20 bp, Human coronavirus
tacagttagattgcaagctg

SEQ ID NO: 49158 - DNA, 20 bp, Human coronavirus
aacacccagatgttgatggg

SEQ ID NO: 49159 - DNA, 20 bp, Human coronavirus
atgggttgtgcaaattacgc

SEQ ID NO: 49160 - DNA, 20 bp, Human coronavirus
tgcaaattacgcggcaagtt

SEQ ID NO: 49161 - DNA, 20 bp, Human coronavirus
cgcggcaagtttgtacaagt

SEQ ID NO: 49162 - DNA, 20 bp, Human coronavirus
gtacaagtgcctgtaggtat

SEQ ID NO: 49163 - DNA, 20 bp, Human coronavirus
ctggcattggtttacattta

SEQ ID NO: 49164 - DNA, 20 bp, Human coronavirus
gtttacatttaaaagttaat

SEQ ID NO: 49165 - DNA, 20 bp, Human coronavirus
acatttaaaagttaattgtt

SEQ ID NO: 49166 - DNA, 20 bp, Human coronavirus
catttaaaagttaattgttg

SEQ ID NO: 49167 - DNA, 20 bp, Human coronavirus
aaaagttaattgttgccgtt

SEQ ID NO: 49168 - DNA, 20 bp, Human coronavirus
gcggacaaattggtggaggt

SEQ ID NO: 49169 - DNA, 20 bp, Human coronavirus
cggacaaattggtggaggta

SEQ ID NO: 49170 - DNA, 20 bp, Human coronavirus
gtggaggtaggcttagtagg

SEQ ID NO: 49171 - DNA, 20 bp, Human coronavirus
gtaggcgttttaacacttga

SEQ ID NO: 49172 - DNA, 20 bp, Human coronavirus
taacacttgataatcaagat

SEQ ID NO: 49173 - DNA, 20 bp, Human coronavirus
tcgcttgtctttaaaagact

SEQ ID NO: 49174 - DNA, 20 bp, Human coronavirus
tctttaaaagacttgctttt

SEQ ID NO: 49175 - DNA, 20 bp, Human coronavirus
aaaagacttgcttttatatg

SEQ ID NO: 49176 - DNA, 20 bp, Human coronavirus
aaagacttgcttttatatgc

SEQ ID NO: 49177 - DNA, 20 bp, Human coronavirus
cttttatatgctgctgatcc

SEQ ID NO: 49178 - DNA, 20 bp, Human coronavirus
ttaataattatgataagagt

SEQ ID NO: 49179 - DNA, 20 bp, Human coronavirus
ataattatgataagagtgct

SEQ ID NO: 49180 - DNA, 20 bp, Human coronavirus
tgataagagtgctggctatc

SEQ ID NO: 49181 - DNA, 20 bp, Human coronavirus
aacaaatttggaaaagccag

SEQ ID NO: 49182 - DNA, 20 bp, Human coronavirus
acaaatttggaaaagccagg

SEQ ID NO: 49183 - DNA, 20 bp, Human coronavirus
ctgtagttataggcaccact

SEQ ID NO: 49184 - DNA, 20 bp, Human coronavirus
taggcaccactaaattttat

SEQ ID NO: 49185 - DNA, 20 bp, Human coronavirus
tatggtggctgggatgatat

SEQ ID NO: 49186 - DNA, 20 bp, Human coronavirus
atggtggctgggatgatatg

SEQ ID NO: 49187 - DNA, 20 bp, Human coronavirus
tggtggctgggatgatatgt

SEQ ID NO: 49188 - DNA, 20 bp, Human coronavirus
aagatcttagtatacgtgct

SEQ ID NO: 49189 - DNA, 20 bp, Human coronavirus
gtatacgtgctcttcagaag

SEQ ID NO: 49190 - DNA, 20 bp, Human coronavirus
agaagcgcttatactcacat

SEQ ID NO: 49191 - DNA, 20 bp, Human coronavirus
tactcacatgtgtatagaag

SEQ ID NO: 49192 - DNA, 20 bp, Human coronavirus
attcaacctttgtcacagaa

SEQ ID NO: 49193 - DNA, 20 bp, Human coronavirus
tgttcacaacacacaatgct

SEQ ID NO: 49194 - DNA, 20 bp, Human coronavirus
acaacacacaatgcttgtaa

SEQ ID NO: 49195 - DNA, 20 bp, Human coronavirus
taaagatggatggtgacgat

SEQ ID NO: 49196 - DNA, 20 bp, Human coronavirus
catatcctaatcctagtcgt

SEQ ID NO: 49197 - DNA, 20 bp, Human coronavirus
ggatatggaaggtagacatc

SEQ ID NO: 49198 - DNA, 20 bp, Human coronavirus
ttttaagtacttgtgatgga

SEQ ID NO: 49199 - DNA, 20 bp, Human coronavirus
taagtacttgtgatggacaa

SEQ ID NO: 49200 - DNA, 20 bp, Human coronavirus
aagtacttgtgatggacaaa

SEQ ID NO: 49201 - DNA, 20 bp, Human coronavirus
agtacttgtgatggacaaaa

SEQ ID NO: 49202 - DNA, 20 bp, Human coronavirus
tgatggacaaaagttcactg

SEQ ID NO: 49203 - DNA, 20 bp, Human coronavirus
catactagctaatgaatgta

SEQ ID NO: 49204 - DNA, 20 bp, Human coronavirus
aaattgtttgctgcagaaac

SEQ ID NO: 49205 - DNA, 20 bp, Human coronavirus
tttgctgcagaaacgcaaaa

SEQ ID NO: 49206 - DNA, 20 bp, Human coronavirus
gctgcagaaacgcaaaaggc

SEQ ID NO: 49207 - DNA, 20 bp, Human coronavirus
ctgcagaaacgcaaaaggca

SEQ ID NO: 49208 - DNA, 20 bp, Human coronavirus
ttccgcaggagaattatagt

SEQ ID NO: 49209 - DNA, 20 bp, Human coronavirus
cgcaggagaattatagtagt

SEQ ID NO: 49210 - DNA, 20 bp, Human coronavirus
tagtagtattagatttgcta

SEQ ID NO: 49211 - DNA, 20 bp, Human coronavirus
gatttgctagtgtttatagt

SEQ ID NO: 49212 - DNA, 20 bp, Human coronavirus
gctagtgtttatagtgtgct

SEQ ID NO: 49213 - DNA, 20 bp, Human coronavirus
aaaattaatgacaccactcg

SEQ ID NO: 49214 - DNA, 20 bp, Human coronavirus
aaattaatgacaccactcgt

SEQ ID NO: 49215 - DNA, 20 bp, Human coronavirus
atgacaccactcgtaagtat

SEQ ID NO: 49216 - DNA, 20 bp, Human coronavirus
actaccataaatgcattacc

SEQ ID NO: 49217 - DNA, 20 bp, Human coronavirus
ctaccataaatgcattacct

SEQ ID NO: 49218 - DNA, 20 bp, Human coronavirus
gtggcataaagctgttttta

SEQ ID NO: 49219 - DNA, 20 bp, Human coronavirus
tggcataaagctgtttttat

SEQ ID NO: 49220 - DNA, 20 bp, Human coronavirus
ttattagcccatataatagt

SEQ ID NO: 49221 - DNA, 20 bp, Human coronavirus
tattagcccatataatagtc

SEQ ID NO: 49222 - DNA, 20 bp, Human coronavirus
attagcccatataatagtca

SEQ ID NO: 49223 - DNA, 20 bp, Human coronavirus
aatgtagtactaatttattt

SEQ ID NO: 49224 - DNA, 20 bp, Human coronavirus
atttaaagattgtagcaaga

SEQ ID NO: 49225 - DNA, 20 bp, Human coronavirus
tttaaagattgtagcaagag

SEQ ID NO: 49226 - DNA, 20 bp, Human coronavirus
aaagattgtagcaagagtta

SEQ ID NO: 49227 - DNA, 20 bp, Human coronavirus
aagattgtagcaagagttat

SEQ ID NO: 49228 - DNA, 20 bp, Human coronavirus
cccacttcaattaggatttt

SEQ ID NO: 49229 - DNA, 20 bp, Human coronavirus
ccacttcaattaggattttc

SEQ ID NO: 49230 - DNA, 20 bp, Human coronavirus
aattaggattttccacagga

SEQ ID NO: 49231 - DNA, 20 bp, Human coronavirus
ggattttccacaggaattga

SEQ ID NO: 49232 - DNA, 20 bp, Human coronavirus
tccacaggaattgattttgt

SEQ ID NO: 49233 - DNA, 20 bp, Human coronavirus
gagctcacttgtctccgcta

SEQ ID NO: 49234 - DNA, 20 bp, Human coronavirus
agctcacttgtctccgctac

SEQ ID NO: 49235 - DNA, 20 bp, Human coronavirus
tctccgctactttgcaaaag

SEQ ID NO: 49236 - DNA, 20 bp, Human coronavirus
gcaaaagtagggcgtgagat

SEQ ID NO: 49237 - DNA, 20 bp, Human coronavirus
caaaagtagggcgtgagatt

SEQ ID NO: 49238 - DNA, 20 bp, Human coronavirus
cctgtgtcaaagattttgat

SEQ ID NO: 49239 - DNA, 20 bp, Human coronavirus
tgattttaagttctatgatg

SEQ ID NO: 49240 - DNA, 20 bp, Human coronavirus
gattttaagttctatgatgc

SEQ ID NO: 49241 - DNA, 20 bp, Human coronavirus
attttaagttctatgatgcc

SEQ ID NO: 49242 - DNA, 20 bp, Human coronavirus
taagttctatgatgcccaac

SEQ ID NO: 49243 - DNA, 20 bp, Human coronavirus
gaagcctatgccattcttct

SEQ ID NO: 49244 - DNA, 20 bp, Human coronavirus
aagcctatgccattcttcta

SEQ ID NO: 49245 - DNA, 20 bp, Human coronavirus
ttctattattcagatacgcc

SEQ ID NO: 49246 - DNA, 20 bp, Human coronavirus
tattattcagatacgccttg

SEQ ID NO: 49247 - DNA, 20 bp, Human coronavirus
ttcagatacgccttgtgtgt

SEQ ID NO: 49248 - DNA, 20 bp, Human coronavirus
tgccattataaatgataaag

SEQ ID NO: 49249 - DNA, 20 bp, Human coronavirus
taaatgataaagttgtggct

SEQ ID NO: 49250 - DNA, 20 bp, Human coronavirus
tggctaagatcgataaggag

SEQ ID NO: 49251 - DNA, 20 bp, Human coronavirus
tcatttttattaataataca

SEQ ID NO: 49252 - DNA, 20 bp, Human coronavirus
ttattaataatacaacatac

SEQ ID NO: 49253 - DNA, 20 bp, Human coronavirus
aagcttttaaacgttctaat

SEQ ID NO: 49254 - DNA, 20 bp, Human coronavirus
taaacgttctaataatggcg

SEQ ID NO: 49255 - DNA, 20 bp, Human coronavirus
aaacgttctaataatggcgt

SEQ ID NO: 49256 - DNA, 20 bp, Human coronavirus
aacgttctaataatggcgtt

SEQ ID NO: 49257 - DNA, 20 bp, Human coronavirus
taataatggcgtttacattt

SEQ ID NO: 49258 - DNA, 20 bp, Human coronavirus
gaacacattgtttatggtaa

SEQ ID NO: 49259 - DNA, 20 bp, Human coronavirus
aacacattgtttatggtaac

SEQ ID NO: 49260 - DNA, 20 bp, Human coronavirus
tttatggtaacttcaaccag

SEQ ID NO: 49261 - DNA, 20 bp, Human coronavirus
atggtaacttcaaccagaag

SEQ ID NO: 49262 - DNA, 20 bp, Human coronavirus
tggtaacttcaaccagaaga

SEQ ID NO: 49263 - DNA, 20 bp, Human coronavirus
ctatcctcgtttgcaagctg

SEQ ID NO: 49264 - DNA, 20 bp, Human coronavirus
tatcctcgtttgcaagctgc

SEQ ID NO: 49265 - DNA, 20 bp, Human coronavirus
gcaagctgcatctgactgga

SEQ ID NO: 49266 - DNA, 20 bp, Human coronavirus
caagctgcatctgactggaa

SEQ ID NO: 49267 - DNA, 20 bp, Human coronavirus
ttctatgcctgtattatata

SEQ ID NO: 49268 - DNA, 20 bp, Human coronavirus
gctctgggtggcagtgttgc

SEQ ID NO: 49269 - DNA, 20 bp, Human coronavirus
ctataaaaataacagagttt

SEQ ID NO: 49270 - DNA, 20 bp, Human coronavirus
tcttggaatgcagaattata

SEQ ID NO: 49271 - DNA, 20 bp, Human coronavirus
cttggaatgcagaattatat

SEQ ID NO: 49272 - DNA, 20 bp, Human coronavirus
ttggaatgcagaattatata

SEQ ID NO: 49273 - DNA, 20 bp, Human coronavirus
taaaatacaaacagcgccac

SEQ ID NO: 49274 - DNA, 20 bp, Human coronavirus
gtcttactatgctggacata

SEQ ID NO: 49275 - DNA, 20 bp, Human coronavirus
ctatgctggacatacagcct

SEQ ID NO: 49276 - DNA, 20 bp, Human coronavirus
atgtcgctattcaagaagtt

SEQ ID NO: 49277 - DNA, 20 bp, Human coronavirus
ttgaatagcgacatcaacac

SEQ ID NO: 49278 - DNA, 20 bp, Human coronavirus
aggaaaatgttgattttata

SEQ ID NO: 49279 - DNA, 20 bp, Human coronavirus
attttataaacagcatgcaa

SEQ ID NO: 49280 - DNA, 20 bp, Human coronavirus
tataaacagcatgcaattca

SEQ ID NO: 49281 - DNA, 20 bp, Human coronavirus
ataaacagcatgcaattcaa

SEQ ID NO: 49282 - DNA, 20 bp, Human coronavirus
taaacagcatgcaattcaat

SEQ ID NO: 49283 - DNA, 20 bp, Human coronavirus
ttataattacacaggcgaag

SEQ ID NO: 49284 - DNA, 20 bp, Human coronavirus
tataattacacaggcgaagg

SEQ ID NO: 49285 - DNA, 20 bp, Human coronavirus
ataattacacaggcgaaggt

SEQ ID NO: 49286 - DNA, 20 bp, Human coronavirus
taattacacaggcgaaggtc

SEQ ID NO: 49287 - DNA, 20 bp, Human coronavirus
cacaggcgaaggtcaacaaa

SEQ ID NO: 49288 - DNA, 20 bp, Human coronavirus
caaatgagctattgttaact

SEQ ID NO: 49289 - DNA, 20 bp, Human coronavirus
aaatgagctattgttaactg

SEQ ID NO: 49290 - DNA, 20 bp, Human coronavirus
ttaactgttcctacgaaagc

SEQ ID NO: 49291 - DNA, 20 bp, Human coronavirus
actgttcctacgaaagcaat

SEQ ID NO: 49292 - DNA, 20 bp, Human coronavirus
ctacgaaagcaatctgtctt

SEQ ID NO: 49293 - DNA, 20 bp, Human coronavirus
tgtaaatacatcctatagtg

SEQ ID NO: 49294 - DNA, 20 bp, Human coronavirus
gtaaatacatcctatagtgt

SEQ ID NO: 49295 - DNA, 20 bp, Human coronavirus
taaatacatcctatagtgtg

SEQ ID NO: 49296 - DNA, 20 bp, Human coronavirus
aacacaggatggtgataata

SEQ ID NO: 49297 - DNA, 20 bp, Human coronavirus
caaggtcttttagaggtctc

SEQ ID NO: 49298 - DNA, 20 bp, Human coronavirus
cacactattatgtcatgcct

SEQ ID NO: 49299 - DNA, 20 bp, Human coronavirus
acactattatgtcatgcctc

SEQ ID NO: 49300 - DNA, 20 bp, Human coronavirus
tgtcatgcctctgacttgta

SEQ ID NO: 49301 - DNA, 20 bp, Human coronavirus
taatagtaagcttactttag

SEQ ID NO: 49302 - DNA, 20 bp, Human coronavirus
ctttagaatattgggttaca

SEQ ID NO: 49303 - DNA, 20 bp, Human coronavirus
caatatagaagcttggctta

SEQ ID NO: 49304 - DNA, 20 bp, Human coronavirus
gcttaatgataagtcggtgc

SEQ ID NO: 49305 - DNA, 20 bp, Human coronavirus
atgataagtcggtgccctct

SEQ ID NO: 49306 - DNA, 20 bp, Human coronavirus
aattgggaacgtaagacatt

SEQ ID NO: 49307 - DNA, 20 bp, Human coronavirus
ggaacgtaagacattttcaa

SEQ ID NO: 49308 - DNA, 20 bp, Human coronavirus
aatccttctacttggaataa

SEQ ID NO: 49309 - DNA, 20 bp, Human coronavirus
atccttctacttggaataag

SEQ ID NO: 49310 - DNA, 20 bp, Human coronavirus
tacttggaataagagatttg

SEQ ID NO: 49311 - DNA, 20 bp, Human coronavirus
gaataagagatttggtttta

SEQ ID NO: 49312 - DNA, 20 bp, Human coronavirus
ggttttatagaagattctgt

SEQ ID NO: 49313 - DNA, 20 bp, Human coronavirus
agttggcataggtgagcact

SEQ ID NO: 49314 - DNA, 20 bp, Human coronavirus
gttggcataggtgagcactg

SEQ ID NO: 49315 - DNA, 20 bp, Human coronavirus
gcataggtgagcactgttcg

SEQ ID NO: 49316 - DNA, 20 bp, Human coronavirus
gggtcttgctgttaaaagtg

SEQ ID NO: 49317 - DNA, 20 bp, Human coronavirus
ctgttaaaagtgattattgt

SEQ ID NO: 49318 - DNA, 20 bp, Human coronavirus
ctatagcggtcgtgtttctg

SEQ ID NO: 49319 - DNA, 20 bp, Human coronavirus
ctgcggcctttcacgctaac

SEQ ID NO: 49320 - DNA, 20 bp, Human coronavirus
tgcggcctttcacgctaact

SEQ ID NO: 49321 - DNA, 20 bp, Human coronavirus
cacgctaactcttccgaacc

SEQ ID NO: 49322 - DNA, 20 bp, Human coronavirus
acgctaactcttccgaacca

SEQ ID NO: 49323 - DNA, 20 bp, Human coronavirus
attcaaacaagctctcctaa

SEQ ID NO: 49324 - DNA, 20 bp, Human coronavirus
ttcaaacaagctctcctaaa

SEQ ID NO: 49325 - DNA, 20 bp, Human coronavirus
aaacaagctctcctaaagtt

SEQ ID NO: 49326 - DNA, 20 bp, Human coronavirus
ctattgattgtgctgcattt

SEQ ID NO: 49327 - DNA, 20 bp, Human coronavirus
attgtgctgcatttgtctgt

SEQ ID NO: 49328 - DNA, 20 bp, Human coronavirus
gggacctcatttgtgtgcaa

SEQ ID NO: 49329 - DNA, 20 bp, Human coronavirus
gtgtgcaaagttataaaggc

SEQ ID NO: 49330 - DNA, 20 bp, Human coronavirus
tgtgcaaagttataaaggca

SEQ ID NO: 49331 - DNA, 20 bp, Human coronavirus
taaaggcatcaaagtgttgc

SEQ ID NO: 49332 - DNA, 20 bp, Human coronavirus
cctccactgctctcagaaaa

SEQ ID NO: 49333 - DNA, 20 bp, Human coronavirus
aagcggaagctcagatagat

SEQ ID NO: 49334 - DNA, 20 bp, Human coronavirus
ttaatggtcgtcttaccgct

SEQ ID NO: 49335 - DNA, 20 bp, Human coronavirus
atggtcgtcttaccgctctt

SEQ ID NO: 49336 - DNA, 20 bp, Human coronavirus
ccgctcttaatgcttatgtt

SEQ ID NO: 49337 - DNA, 20 bp, Human coronavirus
atgcttatgtttctcaacag

SEQ ID NO: 49338 - DNA, 20 bp, Human coronavirus
gtcctggtctgtgcattgct

SEQ ID NO: 49339 - DNA, 20 bp, Human coronavirus
ctggtgatagaggtatagct

SEQ ID NO: 49340 - DNA, 20 bp, Human coronavirus
ttttgttaatgtaaataata

SEQ ID NO: 49341 - DNA, 20 bp, Human coronavirus
tgttaatgtaaataatactt

SEQ ID NO: 49342 - DNA, 20 bp, Human coronavirus
gttaatgtaaataatacttg

SEQ ID NO: 49343 - DNA, 20 bp, Human coronavirus
aaatgaataggttacaggag

SEQ ID NO: 49344 - DNA, 20 bp, Human coronavirus
caggaggcaataaaagtctt

SEQ ID NO: 49345 - DNA, 20 bp, Human coronavirus
aatcagagctacatcaatct

SEQ ID NO: 49346 - DNA, 20 bp, Human coronavirus
gtacatatgaatattatgta

SEQ ID NO: 49347 - DNA, 20 bp, Human coronavirus
tgtaaaatggccttggtatg

SEQ ID NO: 49348 - DNA, 20 bp, Human coronavirus
tattaacggttttaatgtct

SEQ ID NO: 49349 - DNA, 20 bp, Human coronavirus
acggttttaatgtctcagaa

SEQ ID NO: 49350 - DNA, 20 bp, Human coronavirus
taatgtctcagaattagaag

SEQ ID NO: 49351 - DNA, 20 bp, Human coronavirus
aatgtctcagaattagaaga

SEQ ID NO: 49352 - DNA, 20 bp, Human coronavirus
atgtctcagaattagaagat

SEQ ID NO: 49353 - DNA, 20 bp, Human coronavirus
caacccagaaacaaacaact

SEQ ID NO: 49354 - DNA, 20 bp, Human coronavirus
aacccagaaacaaacaactt

SEQ ID NO: 49355 - DNA, 20 bp, Human coronavirus
atgtgtatagatatgaaagg

SEQ ID NO: 49356 - DNA, 20 bp, Human coronavirus
ggccgataattgaggactat

SEQ ID NO: 49357 - DNA, 20 bp, Human coronavirus
aggactatcatactctgacg

SEQ ID NO: 49358 - DNA, 20 bp, Human coronavirus
ttgagaaataatatctaaat

SEQ ID NO: 49359 - DNA, 20 bp, Human coronavirus
agaaataatatctaaatttt

SEQ ID NO: 49360 - DNA, 20 bp, Human coronavirus
taaggatgtcttttactcct

SEQ ID NO: 49361 - DNA, 20 bp, Human coronavirus
aaggatgtcttttactcctg

SEQ ID NO: 49362 - DNA, 20 bp, Human coronavirus
aggatgtcttttactcctgg

SEQ ID NO: 49363 - DNA, 20 bp, Human coronavirus
acggagtctactgggtcgct

SEQ ID NO: 49364 - DNA, 20 bp, Human coronavirus
ggtcccgatcgacaatgtca

SEQ ID NO: 49365 - DNA, 20 bp, Human coronavirus
acatcagcctggttgctagc

SEQ ID NO: 49366 - DNA, 20 bp, Human coronavirus
ctagcgacccagtagactcc

SEQ ID NO: 49367 - DNA, 20 bp, Human coronavirus
tggcaatagaacccctacct

SEQ ID NO: 49368 - DNA, 20 bp, Human coronavirus
ctagtcttgttctggcaaaa

SEQ ID NO: 49369 - DNA, 20 bp, Human coronavirus
ttctggcaaaacttggcaag

SEQ ID NO: 49370 - DNA, 20 bp, Human coronavirus
tggcaaaacttggcaaggat

SEQ ID NO: 49371 - DNA, 20 bp, Human coronavirus
gcaaggatgccactaaacct

SEQ ID NO: 49372 - DNA, 20 bp, Human coronavirus
atgaattgcgctataacggc

SEQ ID NO: 49373 - DNA, 20 bp, Human coronavirus
tgaattgcgctataacggcg

SEQ ID NO: 49374 - DNA, 20 bp, Human coronavirus
cgctataacggcgcaattag

SEQ ID NO: 49375 - DNA, 20 bp, Human coronavirus
ggtttgacagtacactttca

SEQ ID NO: 49376 - DNA, 20 bp, Human coronavirus
gacagtacactttcaggttt

SEQ ID NO: 49377 - DNA, 20 bp, Human coronavirus
tgtcggcatctggtggtaac

SEQ ID NO: 49378 - DNA, 20 bp, Human coronavirus
tagcagcaagacatccattc

SEQ ID NO: 49379 - DNA, 20 bp, Human coronavirus
tgatagagagtgccttatct

SEQ ID NO: 49380 - DNA, 20 bp, Human coronavirus
tctcgacttttctgcgaggg

SEQ ID NO: 49381 - DNA, 20 bp, Human coronavirus
tctgcgaggggttaccacca

SEQ ID NO: 49382 - DNA, 20 bp, Influenza A virus
tcaagaaactggttcatgct

SEQ ID NO: 49383 - DNA, 20 bp, Influenza A virus
atgctaatgcccaagcagaa

SEQ ID NO: 49384 - DNA, 20 bp, Influenza A virus
gcatcagaatggaccaggca

SEQ ID NO: 49385 - DNA, 20 bp, Influenza A virus
catcagaatggaccaggcaa

SEQ ID NO: 49386 - DNA, 20 bp, Influenza A virus
ttctccatgattgcctggtc

SEQ ID NO: 49387 - DNA, 20 bp, Influenza A virus
gggtcctcatcggaggactt

SEQ ID NO: 49388 - DNA, 20 bp, Influenza A virus
aatggaatgataacacagtt

SEQ ID NO: 49389 - DNA, 20 bp, Influenza A virus
gagtctctaaaaatctacag

SEQ ID NO: 49390 - DNA, 20 bp, Influenza A virus
gcttggagaagcagtaatga

SEQ ID NO: 49391 - DNA, 20 bp, Influenza A virus
gagaagcagtaatgagaatg

SEQ ID NO: 49392 - DNA, 20 bp, Influenza A virus
gcagaccaagaactgggtga

SEQ ID NO: 49393 - DNA, 20 bp, Influenza A virus
cagaccaagaactgggtgat

SEQ ID NO: 49394 - DNA, 20 bp, Influenza A virus
cttgaccggcttcgccgaga

SEQ ID NO: 49395 - DNA, 20 bp, Influenza A virus
accggcttcgccgagatcag

SEQ ID NO: 49396 - DNA, 20 bp, Influenza A virus
gccgagatcagaagtcccta

SEQ ID NO: 49397 - DNA, 20 bp, Influenza A virus
aggaaatgtcaagggattgg

SEQ ID NO: 49398 - DNA, 20 bp, Influenza A virus
gttaatgctcattcccaagc

SEQ ID NO: 49399 - DNA, 20 bp, Influenza A virus
atgctcattcccaagcagaa

SEQ ID NO: 49400 - DNA, 20 bp, Influenza A virus
ccaagcagaaagtgacaggg

SEQ ID NO: 49401 - DNA, 20 bp, Influenza A virus
gcattagaatggaccaggca

SEQ ID NO: 49402 - DNA, 20 bp, Influenza A virus
gggtcctcatcggaggactt

SEQ ID NO: 49403 - DNA, 20 bp, Influenza A virus
aatggaatgataacacagtt

SEQ ID NO: 49404 - DNA, 20 bp, Influenza A virus
gagtctctgaaactctacag

SEQ ID NO: 49405 - DNA, 20 bp, Influenza A virus
tccaagtgaatctctgtaga

SEQ ID NO: 49406 - DNA, 20 bp, Influenza A virus
cagagactcgaactgtgtta

SEQ ID NO: 49407 - DNA, 20 bp, Hepatitis C virus
tgtcttcacgcggaaagcgc

SEQ ID NO: 49408 - DNA, 20 bp, Hepatitis C virus
acgcggaaagcgcctagcca

SEQ ID NO: 49409 - DNA, 20 bp, Hepatitis C virus
gtacgagtgtcgtgcagcct

SEQ ID NO: 49410 - DNA, 20 bp, Hepatitis C virus
cgcagaccactatggctctc

SEQ ID NO: 49411 - DNA, 20 bp, Hepatitis C virus
ccgcgtgaagacagaagttc

SEQ ID NO: 49412 - DNA, 20 bp, Hepatitis C virus
ccgggtggcggacagatcgt

SEQ ID NO: 49413 - DNA, 20 bp, Hepatitis C virus
gtggagtatacgtgttgccg

SEQ ID NO: 49414 - DNA, 20 bp, Hepatitis C virus
ccgcgcaggggcccacgatt

SEQ ID NO: 49415 - DNA, 20 bp, Hepatitis C virus
ggtaaagtcatcgataccct

SEQ ID NO: 49416 - DNA, 20 bp, Hepatitis C virus
gccgacctcatggggtacat

SEQ ID NO: 49417 - DNA, 20 bp, Hepatitis C virus
cgacgcctcctacaggagcg

SEQ ID NO: 49418 - DNA, 20 bp, Hepatitis C virus
gggtatcgatgactttaccc

SEQ ID NO: 49419 - DNA, 20 bp, Hepatitis C virus
tgtccaggacggcaatacat

SEQ ID NO: 49420 - DNA, 20 bp, Hepatitis C virus
ctccgacgtacctgactgcc

SEQ ID NO: 49421 - DNA, 20 bp, Hepatitis C virus
ccgtcctggacacaaggtac

SEQ ID NO: 49422 - DNA, 20 bp, Hepatitis C virus
gtcccccgctgtgggtatgg

SEQ ID NO: 49423 - DNA, 20 bp, Hepatitis C virus
accccagaccttgttcgaca

SEQ ID NO: 49424 - DNA, 20 bp, Hepatitis C virus
ccccagaccttgttcgacat

SEQ ID NO: 49425 - DNA, 20 bp, Hepatitis C virus
ttcgacataatggccggggc

SEQ ID NO: 49426 - DNA, 20 bp, Hepatitis C virus
gacataatggccggggccca

SEQ ID NO: 49427 - DNA, 20 bp, Hepatitis C virus
cttcaggcagggatggggcc

SEQ ID NO: 49428 - DNA, 20 bp, Hepatitis C virus
ttcaggcagggatggggccc

SEQ ID NO: 49429 - DNA, 20 bp, Hepatitis C virus
aggcagggatggggcccctt

SEQ ID NO: 49430 - DNA, 20 bp, Hepatitis C virus
acagatgctaacatcaccgg

SEQ ID NO: 49431 - DNA, 20 bp, Hepatitis C virus
tgatgacagaccatactgct

SEQ ID NO: 49432 - DNA, 20 bp, Hepatitis C virus
ctgctgaagtcccagcggcc

SEQ ID NO: 49433 - DNA, 20 bp, Hepatitis C virus
gggtgctcgtggatgaactc

SEQ ID NO: 49434 - DNA, 20 bp, Hepatitis C virus
ggtgctcgtggatgaactcc

SEQ ID NO: 49435 - DNA, 20 bp, Hepatitis C virus
atccacgagcacccaaacca

SEQ ID NO: 49436 - DNA, 20 bp, Hepatitis C virus
agcaggaacacatctttctc

SEQ ID NO: 49437 - DNA, 20 bp, Hepatitis C virus
caactggaccaggggggagc

SEQ ID NO: 49438 - DNA, 20 bp, Hepatitis C virus
ttgaatgcagcagcggatgt

SEQ ID NO: 49439 - DNA, 20 bp, Hepatitis C virus
aatgcagcagcggatgttgc

SEQ ID NO: 49440 - DNA, 20 bp, Hepatitis C virus
ctcactgcggtcacgatcct

SEQ ID NO: 49441 - DNA, 20 bp, Hepatitis C virus
gagaacctggtcacgctgaa

SEQ ID NO: 49442 - DNA, 20 bp, Hepatitis C virus
agcgtgaccaggttctccaa

SEQ ID NO: 49443 - DNA, 20 bp, Hepatitis C virus
tccaaggctgcttctgtctg

SEQ ID NO: 49444 - DNA, 20 bp, Hepatitis C virus
agtcccatggaaatcaaggt

SEQ ID NO: 49445 - DNA, 20 bp, Hepatitis C virus
gtcccatggaaatcaaggtc

SEQ ID NO: 49446 - DNA, 20 bp, Hepatitis C virus
cggagatattctttgcgggc

SEQ ID NO: 49447 - DNA, 20 bp, Hepatitis C virus
atttccatgggactaaatat

SEQ ID NO: 49448 - DNA, 20 bp, Hepatitis C virus
ccatgggactaaatattaca

SEQ ID NO: 49449 - DNA, 20 bp, Hepatitis C virus
ctacggctacccagaccttc

SEQ ID NO: 49450 - DNA, 20 bp, Hepatitis C virus
tacggctacccagaccttcc

SEQ ID NO: 49451 - DNA, 20 bp, Hepatitis C virus
ctaggtacaacagtaggggg

SEQ ID NO: 49452 - DNA, 20 bp, Hepatitis C virus
tatggactgtttatcatgga

SEQ ID NO: 49453 - DNA, 20 bp, Hepatitis C virus
atcatggagcaggttcgaga

SEQ ID NO: 49454 - DNA, 20 bp, Hepatitis C virus
ctctggaggtcccgttatgt

SEQ ID NO: 49455 - DNA, 20 bp, Hepatitis C virus
tgtgcccttcggggcatgtt

SEQ ID NO: 49456 - DNA, 20 bp, Hepatitis C virus
ggggcatgttgcggggatct

SEQ ID NO: 49457 - DNA, 20 bp, Hepatitis C virus
cggggatctttagggctgct

SEQ ID NO: 49458 - DNA, 20 bp, Hepatitis C virus
agggctgctgtgtgcaccag

SEQ ID NO: 49459 - DNA, 20 bp, Hepatitis C virus
atgtcgcgtgcctatgggat

SEQ ID NO: 49460 - DNA, 20 bp, Hepatitis C virus
caactggtgctaaactgacc

SEQ ID NO: 49461 - DNA, 20 bp, Hepatitis C virus
agcaccagttgtaacggtgc

SEQ ID NO: 49462 - DNA, 20 bp, Hepatitis C virus
gcaccagttgtaacggtgcg

SEQ ID NO: 49463 - DNA, 20 bp, Hepatitis C virus
taacggtgcggttcccagtg

SEQ ID NO: 49464 - DNA, 20 bp, Hepatitis C virus
cccgcagccaacgtcgcggc

SEQ ID NO: 49465 - DNA, 20 bp, Hepatitis C virus
ccgcagccaacgtcgcggcc

SEQ ID NO: 49466 - DNA, 20 bp, Hepatitis C virus
cagacggtctttcaccggag

SEQ ID NO: 49467 - DNA, 20 bp, Hepatitis C virus
caccggaggcgacatatcgg

SEQ ID NO: 49468 - DNA, 20 bp, Hepatitis C virus
accggaggcgacatatcggt

SEQ ID NO: 49469 - DNA, 20 bp, Hepatitis C virus
acttctcgtacctaactgcc

SEQ ID NO: 49470 - DNA, 20 bp, Hepatitis C virus
tcgtacctaactgcctacca

SEQ ID NO: 49471 - DNA, 20 bp, Hepatitis C virus
ggacgagatgtggaagtgtc

SEQ ID NO: 49472 - DNA, 20 bp, Hepatitis C virus
agccgcacgagacacttcca

SEQ ID NO: 49473 - DNA, 20 bp, Hepatitis C virus
cacatctcgtcccaacttgg

SEQ ID NO: 49474 - DNA, 20 bp, Hepatitis C virus
tgggtcatattgagctggag

SEQ ID NO: 49475 - DNA, 20 bp, Hepatitis C virus
agctggagggcaagccagca

SEQ ID NO: 49476 - DNA, 20 bp, Hepatitis C virus
cagacaaagaggtgttgtat

SEQ ID NO: 49477 - DNA, 20 bp, Hepatitis C virus
tatcaacaatacgatgagat

SEQ ID NO: 49478 - DNA, 20 bp, Hepatitis C virus
cctgagcttgttcgatatat

SEQ ID NO: 49479 - DNA, 20 bp, Hepatitis C virus
tggcgttcactgcttcagtc

SEQ ID NO: 49480 - DNA, 20 bp, Hepatitis C virus
actgcttcagtcaccagtcc

SEQ ID NO: 49481 - DNA, 20 bp, Hepatitis C virus
agtcaccagtcccctgacga

SEQ ID NO: 49482 - DNA, 20 bp, Hepatitis C virus
tttaacatactcggggggtg

SEQ ID NO: 49483 - DNA, 20 bp, Hepatitis C virus
ttaacatactcggggggtgg

SEQ ID NO: 49484 - DNA, 20 bp, Hepatitis C virus
atccactgtaccgctccctc

SEQ ID NO: 49485 - DNA, 20 bp, Hepatitis C virus
tgccagcgctccctgggctg

SEQ ID NO: 49486 - DNA, 20 bp, Hepatitis C virus
atttcctgtcaaaagggata

SEQ ID NO: 49487 - DNA, 20 bp, Hepatitis C virus
cctgtcaaaagggatacaag

SEQ ID NO: 49488 - DNA, 20 bp, Hepatitis C virus
ctgtcaaaagggatacaagg

SEQ ID NO: 49489 - DNA, 20 bp, Hepatitis C virus
acatcacaccgtccccccgc

SEQ ID NO: 49490 - DNA, 20 bp, Hepatitis C virus
catcacgggggccacagaag

SEQ ID NO: 49491 - DNA, 20 bp, Hepatitis C virus
tttactgaagtggatggagt

SEQ ID NO: 49492 - DNA, 20 bp, Hepatitis C virus
actgaagtggatggagtgag

SEQ ID NO: 49493 - DNA, 20 bp, Hepatitis C virus
ctgaagtggatggagtgaga

SEQ ID NO: 49494 - DNA, 20 bp, Hepatitis C virus
agtaaagaactcagcagccg

SEQ ID NO: 49495 - DNA, 20 bp, Hepatitis C virus
aaggccacttgccagacgca

SEQ ID NO: 49496 - DNA, 20 bp, Hepatitis C virus
ccagacgcataggcctcatc

SEQ ID NO: 49497 - DNA, 20 bp, Hepatitis C virus
ccgccataacaagttggcgt

SEQ ID NO: 49498 - DNA, 20 bp, Hepatitis C virus
gcgtccactagctcagcgtc

SEQ ID NO: 49499 - DNA, 20 bp, Hepatitis C virus
ccaccacggggcgctccacc

SEQ ID NO: 49500 - DNA, 20 bp, Hepatitis C virus
agctggacggctctaatgtg

SEQ ID NO: 49501 - DNA, 20 bp, Hepatitis C virus
ttcagctagcgcggctagcg

SEQ ID NO: 49502 - DNA, 20 bp, Hepatitis C virus
tcagctagcgcggctagcgc

SEQ ID NO: 49503 - DNA, 20 bp, Hepatitis C virus
cagctagcgcggctagcgcc

SEQ ID NO: 49504 - DNA, 20 bp, Hepatitis C virus
ttggaccggcgccctgataa

SEQ ID NO: 49505 - DNA, 20 bp, Hepatitis C virus
gaccggcgccctgataacac

SEQ ID NO: 49506 - DNA, 20 bp, Hepatitis C virus
agacatcataacctagtcta

SEQ ID NO: 49507 - DNA, 20 bp, Hepatitis C virus
tgatgtctcaacagggagtt

SEQ ID NO: 49508 - DNA, 20 bp, Hepatitis C virus
ctgagtgggctgatgggcag

SEQ ID NO: 49509 - DNA, 20 bp, Hepatitis C virus
gggtatagtgcgaaggacgt

SEQ ID NO: 49510 - DNA, 20 bp, Hepatitis C virus
gctccttgtccagcagggcc

SEQ ID NO: 49511 - DNA, 20 bp, Hepatitis C virus
tccagcagggccattaacca

SEQ ID NO: 49512 - DNA, 20 bp, Hepatitis C virus
accagatccgctccgtctgg

SEQ ID NO: 49513 - DNA, 20 bp, Hepatitis C virus
ctggaagacaccacaactcc

SEQ ID NO: 49514 - DNA, 20 bp, Hepatitis C virus
aaccggaggccaggaaagtg

SEQ ID NO: 49515 - DNA, 20 bp, Hepatitis C virus
actgcggaggccctatgttc

SEQ ID NO: 49516 - DNA, 20 bp, Hepatitis C virus
ctgcggaggccctatgttca

SEQ ID NO: 49517 - DNA, 20 bp, Hepatitis C virus
ctgttgaacatagggcctcc

SEQ ID NO: 49518 - DNA, 20 bp, Hepatitis C virus
aacatagggcctccgcagta

SEQ ID NO: 49519 - DNA, 20 bp, Hepatitis C virus
cttgtctgcggagatgattt

SEQ ID NO: 49520 - DNA, 20 bp, Hepatitis C virus
ttgtctgcggagatgatttg

SEQ ID NO: 49521 - DNA, 20 bp, Hepatitis C virus
tctgcggagatgatttggtc

SEQ ID NO: 49522 - DNA, 20 bp, Hepatitis C virus
ggtcgtggtggctgagagtg

SEQ ID NO: 49523 - DNA, 20 bp, Hepatitis C virus
gtcgtggtggctgagagtga

SEQ ID NO: 49524 - DNA, 20 bp, Influenza A virus
catcctaagtgctgggttct

SEQ ID NO: 49525 - DNA, 20 bp, Influenza A virus
atcctaagtgctgggttctt

SEQ ID NO: 49526 - DNA, 20 bp, Influenza A virus
ttctcctgtcttcctgatgt

SEQ ID NO: 49527 - DNA, 20 bp, Influenza A virus
tcctgtcttcctgatgtgta

SEQ ID NO: 49528 - DNA, 20 bp, Influenza A virus
ctgatgtgtacttcttgatt

SEQ ID NO: 49529 - DNA, 20 bp, Influenza A virus
attatccaaaaatctacaaa

SEQ ID NO: 49530 - DNA, 20 bp, Influenza A virus
tccaaaaatctacaaaactt

SEQ ID NO: 49531 - DNA, 20 bp, Influenza A virus
ttttgaaagagtcgaaaggc

SEQ ID NO: 49532 - DNA, 20 bp, Influenza A virus
tgaaagagtcgaaaggctaa

SEQ ID NO: 49533 - DNA, 20 bp, Influenza A virus
gaaagagtcgaaaggctaaa

SEQ ID NO: 49534 - DNA, 20 bp, Influenza A virus
caaaatttctcctttgatgg

SEQ ID NO: 49535 - DNA, 20 bp, Influenza A virus
tgcaatcctggagttcttct

SEQ ID NO: 49536 - DNA, 20 bp, Influenza A virus
gcaatcctggagttcttctt

SEQ ID NO: 49537 - DNA, 20 bp, Influenza A virus
caatcctggagttcttcttt

SEQ ID NO: 49538 - DNA, 20 bp, Influenza A virus
ttctttcttctctttggtta

SEQ ID NO: 49539 - DNA, 20 bp, Influenza A virus
attattgctgctaggaacat

SEQ ID NO: 49540 - DNA, 20 bp, Influenza A virus
ttgctgctaggaacatagtg

SEQ ID NO: 49541 - DNA, 20 bp, Influenza A virus
ctgctaggaacatagtgaga

SEQ ID NO: 49542 - DNA, 20 bp, Influenza A virus
attggagatgtgccacagca

SEQ ID NO: 49543 - DNA, 20 bp, Influenza A virus
ttggagatgtgccacagcac

SEQ ID NO: 49544 - DNA, 20 bp, Influenza A virus
cgggcaatcttcaaacattg

SEQ ID NO: 49545 - DNA, 20 bp, Influenza A virus
aaacattgaagataagagtg

SEQ ID NO: 49546 - DNA, 20 bp, Influenza A virus
aagataagagtgcatgaggg

SEQ ID NO: 49547 - DNA, 20 bp, Influenza A virus
acaatggttgggagaagagc

SEQ ID NO: 49548 - DNA, 20 bp, Influenza A virus
ggagaagagcaacagccata

SEQ ID NO: 49549 - DNA, 20 bp, Influenza A virus
taagacattttcagaaggat

SEQ ID NO: 49550 - DNA, 20 bp, Influenza A virus
aagacattttcagaaggatg

SEQ ID NO: 49551 - DNA, 20 bp, Influenza A virus
agacattttcagaaggatgc

SEQ ID NO: 49552 - DNA, 20 bp, Influenza A virus
tcagaaggatgcgaaagtgc

SEQ ID NO: 49553 - DNA, 20 bp, Influenza A virus
cagaaggatgcgaaagtgct

SEQ ID NO: 49554 - DNA, 20 bp, Influenza A virus
ctcatcgtcaatgatgtggg

SEQ ID NO: 49555 - DNA, 20 bp, Influenza A virus
atctcccacatcattgacga

SEQ ID NO: 49556 - DNA, 20 bp, Influenza A virus
acgatgagtaagttattgtc

SEQ ID NO: 49557 - DNA, 20 bp, Influenza A virus
ttgtcagtttctctgttccc

SEQ ID NO: 49558 - DNA, 20 bp, Influenza A virus
tcagtttctctgttccctgt

SEQ ID NO: 49559 - DNA, 20 bp, Influenza A virus
gtgagaactctgttccaaca

SEQ ID NO: 49560 - DNA, 20 bp, Influenza A virus
tgagaactctgttccaacaa

SEQ ID NO: 49561 - DNA, 20 bp, Influenza A virus
caacaaatgagggatgtgct

SEQ ID NO: 49562 - DNA, 20 bp, Influenza A virus
ggacatttgataccgcacag

SEQ ID NO: 49563 - DNA, 20 bp, Influenza A virus
gataccgcacagataataaa

SEQ ID NO: 49564 - DNA, 20 bp, Influenza A virus
tgaggggattcctcattctg

SEQ ID NO: 49565 - DNA, 20 bp, Influenza A virus
ctcattctgggcaaagaaga

SEQ ID NO: 49566 - DNA, 20 bp, Influenza A virus
tgggcaaagaagacaggaga

SEQ ID NO: 49567 - DNA, 20 bp, Influenza A virus
agcatcaatgaactgagcaa

SEQ ID NO: 49568 - DNA, 20 bp, Influenza A virus
ctcagttcattgatgcttaa

SEQ ID NO: 49569 - DNA, 20 bp, Hepatitis C virus
gcagggctcttctatcagca

SEQ ID NO: 49570 - DNA, 20 bp, Hepatitis C virus
tatcagcacaaattcaactc

SEQ ID NO: 49571 - DNA, 20 bp, Hepatitis C virus
aactcttcaggctgtcctga

SEQ ID NO: 49572 - DNA, 20 bp, Hepatitis C virus
aggctgtcctgagaggttgg

SEQ ID NO: 49573 - DNA, 20 bp, Hepatitis C virus
gccagctgccgacgccttac

SEQ ID NO: 49574 - DNA, 20 bp, Hepatitis C virus
gttcggttgtacctggatga

SEQ ID NO: 49575 - DNA, 20 bp, Hepatitis C virus
ggttgtacctggatgaactc

SEQ ID NO: 49576 - DNA, 20 bp, Hepatitis C virus
tacctggatgaactcaactg

SEQ ID NO: 49577 - DNA, 20 bp, Hepatitis C virus
accaaagtgtgcggagcgcc

SEQ ID NO: 49578 - DNA, 20 bp, Hepatitis C virus
tgtcatcggaggggtgggca

SEQ ID NO: 49579 - DNA, 20 bp, Hepatitis C virus
ctgctgtccaccacacagtg

SEQ ID NO: 49580 - DNA, 20 bp, Hepatitis C virus
cagatcacagcgttcgcccc

SEQ ID NO: 49581 - DNA, 20 bp, Hepatitis C virus
tgtccttcctcgtgttcttc

SEQ ID NO: 49582 - DNA, 20 bp, Hepatitis C virus
ctcgtgttcttctgctttgc

SEQ ID NO: 49583 - DNA, 20 bp, Hepatitis C virus
ttctgctttgcgtggtatct

SEQ ID NO: 49584 - DNA, 20 bp, Hepatitis C virus
tgctttgcgtggtatctgaa

SEQ ID NO: 49585 - DNA, 20 bp, Hepatitis C virus
gcgtggtatctgaagggtag

SEQ ID NO: 49586 - DNA, 20 bp, Hepatitis C virus
gacatcaccaaactactcct

SEQ ID NO: 49587 - DNA, 20 bp, Hepatitis C virus
acatcaccaaactactcctg

SEQ ID NO: 49588 - DNA, 20 bp, Hepatitis C virus
ggacccctttggattcttca

SEQ ID NO: 49589 - DNA, 20 bp, Hepatitis C virus
ggattcttcaagccagtttg

SEQ ID NO: 49590 - DNA, 20 bp, Hepatitis C virus
gattcttcaagccagtttgc

SEQ ID NO: 49591 - DNA, 20 bp, Hepatitis C virus
tcccgaatggagaccaagct

SEQ ID NO: 49592 - DNA, 20 bp, Hepatitis C virus
atgatgtcaccgcacgcggc

SEQ ID NO: 49593 - DNA, 20 bp, Hepatitis C virus
gtctccattcgggagaagac

SEQ ID NO: 49594 - DNA, 20 bp, Hepatitis C virus
gggagaagacgactggttcc

SEQ ID NO: 49595 - DNA, 20 bp, Hepatitis C virus
tgggctggcccgctcctcaa

SEQ ID NO: 49596 - DNA, 20 bp, Hepatitis C virus
ccgctcattgacaccctgca

SEQ ID NO: 49597 - DNA, 20 bp, Hepatitis C virus
aggagcgggccagcccacaa

SEQ ID NO: 49598 - DNA, 20 bp, Hepatitis C virus
gtccacattggtatacatct

SEQ ID NO: 49599 - DNA, 20 bp, Hepatitis C virus
gtatacatctggatgacagg

SEQ ID NO: 49600 - DNA, 20 bp, Hepatitis C virus
atccctgtggagaacctaga

SEQ ID NO: 49601 - DNA, 20 bp, Hepatitis C virus
tccctgtggagaacctagag

SEQ ID NO: 49602 - DNA, 20 bp, Hepatitis C virus
acggacaactcctctccacc

SEQ ID NO: 49603 - DNA, 20 bp, Hepatitis C virus
tccgtgaacaccggggatct

SEQ ID NO: 49604 - DNA, 20 bp, Hepatitis C virus
tctctaggttctccacaggg

SEQ ID NO: 49605 - DNA, 20 bp, Hepatitis C virus
cttgccgacggcgggtgctc

SEQ ID NO: 49606 - DNA, 20 bp, Hepatitis C virus
ccgacggcgggtgctcagga

SEQ ID NO: 49607 - DNA, 20 bp, Hepatitis C virus
tgacataataatttgtgacg

SEQ ID NO: 49608 - DNA, 20 bp, Hepatitis C virus
gtgacgagtgccactccacg

SEQ ID NO: 49609 - DNA, 20 bp, Hepatitis C virus
tgacgagtgccactccacgg

SEQ ID NO: 49610 - DNA, 20 bp, Hepatitis C virus
ggcatcaatgccgtggccta

SEQ ID NO: 49611 - DNA, 20 bp, Hepatitis C virus
acgtgtctgtcatcccgacc

SEQ ID NO: 49612 - DNA, 20 bp, Hepatitis C virus
atgcccaatgcgaccagctt

SEQ ID NO: 49613 - DNA, 20 bp, Hepatitis C virus
gactcgtccgtcctctgtga

SEQ ID NO: 49614 - DNA, 20 bp, Hepatitis C virus
gtatgagctcacgcccgccg

SEQ ID NO: 49615 - DNA, 20 bp, Hepatitis C virus
agaatgaagtcaccctgacg

SEQ ID NO: 49616 - DNA, 20 bp, Hepatitis C virus
gcggcgtcctggctgctctg

SEQ ID NO: 49617 - DNA, 20 bp, Hepatitis C virus
ggtgattgggtgcgtcaggg

SEQ ID NO: 49618 - DNA, 20 bp, Hepatitis C virus
gtgattgggtgcgtcagggt

SEQ ID NO: 49619 - DNA, 20 bp, Hepatitis C virus
ggtgcgtcagggtgacttca

SEQ ID NO: 49620 - DNA, 20 bp, Hepatitis C virus
aagcagaaggccctcggcct

SEQ ID NO: 49621 - DNA, 20 bp, Hepatitis C virus
tcacccctgctgtccagacc

SEQ ID NO: 49622 - DNA, 20 bp, Hepatitis C virus
tgggcgaagcacatgtggaa

SEQ ID NO: 49623 - DNA, 20 bp, Hepatitis C virus
cacatgtgcttcgcccagaa

SEQ ID NO: 49624 - DNA, 20 bp, Hepatitis C virus
gcccagaagacctcgagttt

SEQ ID NO: 49625 - DNA, 20 bp, Hepatitis C virus
gactggggaaggtcctcgtg

SEQ ID NO: 49626 - DNA, 20 bp, Hepatitis C virus
ttgcagggtatggcgcgggc

SEQ ID NO: 49627 - DNA, 20 bp, Hepatitis C virus
cagggtatggcgcgggcgtg

SEQ ID NO: 49628 - DNA, 20 bp, Hepatitis C virus
tagcattcaagatcatgagc

SEQ ID NO: 49629 - DNA, 20 bp, Hepatitis C virus
aagatcatgagcggtgaggt

SEQ ID NO: 49630 - DNA, 20 bp, Hepatitis C virus
cagtgaggctgctgagtatg

SEQ ID NO: 49631 - DNA, 20 bp, Hepatitis C virus
cccattaacgcctacaccac

SEQ ID NO: 49632 - DNA, 20 bp, Hepatitis C virus
acgcctacaccacgggcccc

SEQ ID NO: 49633 - DNA, 20 bp, Hepatitis C virus
atggggaacgtcccactcca

SEQ ID NO: 49634 - DNA, 20 bp, Hepatitis C virus
ctgcaggtcctaggaccgac

SEQ ID NO: 49635 - DNA, 20 bp, Hepatitis C virus
agagtaggactccacgagta

SEQ ID NO: 49636 - DNA, 20 bp, Hepatitis C virus
ccttgcgagcccgaaccgga

SEQ ID NO: 49637 - DNA, 20 bp, Hepatitis C virus
cgagcccgaaccggacgtag

SEQ ID NO: 49638 - DNA, 20 bp, Hepatitis C virus
acgtccatgctcactgatcc

SEQ ID NO: 49639 - DNA, 20 bp, Hepatitis C virus
gggctcgcaaggtaattgcg

SEQ ID NO: 49640 - DNA, 20 bp, Hepatitis C virus
tgcggaagtctcggagattc

SEQ ID NO: 49641 - DNA, 20 bp, Hepatitis C virus
gcccgggccctgcccgtttg

SEQ ID NO: 49642 - DNA, 20 bp, Hepatitis C virus
gggcgcggccggactacaac

SEQ ID NO: 49643 - DNA, 20 bp, Hepatitis C virus
ggcgcggccggactacaacc

SEQ ID NO: 49644 - DNA, 20 bp, Hepatitis C virus
ttccacgtctctactagcgg

SEQ ID NO: 49645 - DNA, 20 bp, Hepatitis C virus
tggctgcccccccgactccg

SEQ ID NO: 49646 - DNA, 20 bp, Hepatitis C virus
agtcctattcttccatgccc

SEQ ID NO: 49647 - DNA, 20 bp, Hepatitis C virus
ttccatgccccccctggagg

SEQ ID NO: 49648 - DNA, 20 bp, Hepatitis C virus
catgccccccctggaggggg

SEQ ID NO: 49649 - DNA, 20 bp, Hepatitis C virus
ctatccgtagaggaagcttg

SEQ ID NO: 49650 - DNA, 20 bp, Hepatitis C virus
cagcctgacgcccccacatt

SEQ ID NO: 49651 - DNA, 20 bp, Hepatitis C virus
agccaaatccaagtttggct

SEQ ID NO: 49652 - DNA, 20 bp, Hepatitis C virus
tgccccatagccaaacttgg

SEQ ID NO: 49653 - DNA, 20 bp, Hepatitis C virus
gccccatagccaaacttgga

SEQ ID NO: 49654 - DNA, 20 bp, Hepatitis C virus
cccgacctgggcgtgcgcgt

SEQ ID NO: 49655 - DNA, 20 bp, Hepatitis C virus
gcaagctccccctggccgtg

SEQ ID NO: 49656 - DNA, 20 bp, Hepatitis C virus
gaatccgtaggagcttccca

SEQ ID NO: 49657 - DNA, 20 bp, Hepatitis C virus
ccatcacggccagggggagc

SEQ ID NO: 49658 - DNA, 20 bp, Hepatitis C virus
ctaaccacgtcgtacagggc

SEQ ID NO: 49659 - DNA, 20 bp, Hepatitis C virus
ccaattcaaggggggaaaac

SEQ ID NO: 49660 - DNA, 20 bp, Hepatitis C virus
aaggggggaaaactgcggct

SEQ ID NO: 49661 - DNA, 20 bp, Hepatitis C virus
ctacatcaaggcccgggcag

SEQ ID NO: 49662 - DNA, 20 bp, Hepatitis C virus
atgtagcaagtgagggtgtt

SEQ ID NO: 49663 - DNA, 20 bp, Hepatitis C virus
ccacagctagttgtcagtac

SEQ ID NO: 49664 - DNA, 20 bp, Hepatitis C virus
cccgtgaccctacaaccccc

SEQ ID NO: 49665 - DNA, 20 bp, Hepatitis C virus
ctggctaggcaacataatca

SEQ ID NO: 49666 - DNA, 20 bp, Hepatitis C virus
tgttgcctagccaggaattg

SEQ ID NO: 49667 - DNA, 20 bp, Hepatitis C virus
cctagccaggaattgactgg

SEQ ID NO: 49668 - DNA, 20 bp, Hepatitis C virus
actggagtgtgtcttgctgt

SEQ ID NO: 49669 - DNA, 20 bp, Hepatitis C virus
gggtcccgcccttgcgagct

SEQ ID NO: 49670 - DNA, 20 bp, Hepatitis C virus
cgagcttggagacaccgggc

SEQ ID NO: 49671 - DNA, 20 bp, Hepatitis C virus
gagacaccgggcccggagcg

SEQ ID NO: 49672 - DNA, 20 bp, Hepatitis C virus
tgtccagaggaggcagggct

SEQ ID NO: 49673 - DNA, 20 bp, Hepatitis C virus
ccacatatggcagccctgcc

SEQ ID NO: 49674 - DNA, 20 bp, Human papillomavirus type 10
cttttgtgtagaaattgtgg

SEQ ID NO: 49675 - DNA, 20 bp, Human papillomavirus type 10
tgtgtagaaattgtggaata

SEQ ID NO: 49676 - DNA, 20 bp, Human papillomavirus type 10
gtgtagaaattgtggaatac

SEQ ID NO: 49677 - DNA, 20 bp, Human papillomavirus type 10
tgtagaaattgtggaatacc

SEQ ID NO: 49678 - DNA, 20 bp, Human papillomavirus type 10
tggaatacctttggaggacc

SEQ ID NO: 49679 - DNA, 20 bp, Human papillomavirus type 10
gttacgatgtctgtcttttt

SEQ ID NO: 49680 - DNA, 20 bp, Human papillomavirus type 10
cgatgtctgtctttttcttc

SEQ ID NO: 49681 - DNA, 20 bp, Human papillomavirus type 10
ttcttcccttaccagcggtt

SEQ ID NO: 49682 - DNA, 20 bp, Human papillomavirus type 10
tcttcccttaccagcggttt

SEQ ID NO: 49683 - DNA, 20 bp, Human papillomavirus type 10
cttcccttaccagcggtttg

SEQ ID NO: 49684 - DNA, 20 bp, Human papillomavirus type 10
gatgaagaagattatacaga

SEQ ID NO: 49685 - DNA, 20 bp, Human papillomavirus type 10
tacagatgcggtggaaccag

SEQ ID NO: 49686 - DNA, 20 bp, Human papillomavirus type 10
gtacattctgttaccaccct

SEQ ID NO: 49687 - DNA, 20 bp, Human papillomavirus type 10
tacattctgttaccacccta

SEQ ID NO: 49688 - DNA, 20 bp, Human papillomavirus type 10
tgttaccaccctatacgctt

SEQ ID NO: 49689 - DNA, 20 bp, Human papillomavirus type 10
gagctaccggacagtggcta

SEQ ID NO: 49690 - DNA, 20 bp, Human papillomavirus type 10
ggcctttgctgactgtctcc

SEQ ID NO: 49691 - DNA, 20 bp, Human papillomavirus type 10
gcctttgctgactgtctccc

SEQ ID NO: 49692 - DNA, 20 bp, Human papillomavirus type 10
gctgactgtctccccagctt

SEQ ID NO: 49693 - DNA, 20 bp, Human papillomavirus type 10
ctgactgtctccccagcttt

SEQ ID NO: 49694 - DNA, 20 bp, Human papillomavirus type 10
tgtgattatgcacacataca

SEQ ID NO: 49695 - DNA, 20 bp, Human papillomavirus type 10
tgcacacatacaagtgctac

SEQ ID NO: 49696 - DNA, 20 bp, Human papillomavirus type 10
tgctggtacggtacaaacgt

SEQ ID NO: 49697 - DNA, 20 bp, Human papillomavirus type 10
ttggcacgtttgtaccgtac

SEQ ID NO: 49698 - DNA, 20 bp, Human papillomavirus type 10
tggcacgtttgtaccgtacc

SEQ ID NO: 49699 - DNA, 20 bp, Human papillomavirus type 10
tttagtgttttatggaccag

SEQ ID NO: 49700 - DNA, 20 bp, Human papillomavirus type 10
agtgttttatggaccagcag

SEQ ID NO: 49701 - DNA, 20 bp, Human papillomavirus type 10
gtgttttatggaccagcaga

SEQ ID NO: 49702 - DNA, 20 bp, Human papillomavirus type 10
tatggaccagcagacactgg

SEQ ID NO: 49703 - DNA, 20 bp, Human papillomavirus type 10
atggaccagcagacactggc

SEQ ID NO: 49704 - DNA, 20 bp, Human papillomavirus type 10
aatgatcaaaattggaaatg

SEQ ID NO: 49705 - DNA, 20 bp, Human papillomavirus type 10
gaaatgcttttttcgaaggt

SEQ ID NO: 49706 - DNA, 20 bp, Human papillomavirus type 10
tttcgaaggttatgggcacg

SEQ ID NO: 49707 - DNA, 20 bp, Human papillomavirus type 10
ttcgaaggttatgggcacgt

SEQ ID NO: 49708 - DNA, 20 bp, Human papillomavirus type 10
tcgaaggttatgggcacgtt

SEQ ID NO: 49709 - DNA, 20 bp, Human papillomavirus type 10
tacacatgaaaatatgaaca

SEQ ID NO: 49710 - DNA, 20 bp, Human papillomavirus type 10
tgtgaatttcaaggatgacg

SEQ ID NO: 49711 - DNA, 20 bp, Human papillomavirus type 10
caaggatgacgcttgtgtat

SEQ ID NO: 49712 - DNA, 20 bp, Human papillomavirus type 10
aaggatgacgcttgtgtata

SEQ ID NO: 49713 - DNA, 20 bp, Human papillomavirus type 10
tgtatatggggaaacaggca

SEQ ID NO: 49714 - DNA, 20 bp, Human papillomavirus type 10
cacccagaaggccgcggaac

SEQ ID NO: 49715 - DNA, 20 bp, Human papillomavirus type 10
tccacccgctcgttccgcgg

SEQ ID NO: 49716 - DNA, 20 bp, Human papillomavirus type 10
cgcggccttctgggtggaat

SEQ ID NO: 49717 - DNA, 20 bp, Human papillomavirus type 10
tgggtggaatctttggaccc

SEQ ID NO: 49718 - DNA, 20 bp, Human papillomavirus type 10
ggacccttgtcgctgctgct

SEQ ID NO: 49719 - DNA, 20 bp, Human papillomavirus type 10
ctgggctttttttgtgctgc

SEQ ID NO: 49720 - DNA, 20 bp, Human papillomavirus type 10
ttttgtgctgctgctgtgtt

SEQ ID NO: 49721 - DNA, 20 bp, Human papillomavirus type 10
tttgtgctgctgctgtgttt

SEQ ID NO: 49722 - DNA, 20 bp, Human papillomavirus type 10
ttgtgctgctgctgtgtttg

SEQ ID NO: 49723 - DNA, 20 bp, Human papillomavirus type 10
tgtgctgctgctgtgtttgt

SEQ ID NO: 49724 - DNA, 20 bp, Human papillomavirus type 10
ttcccaaagtagagggcacc

SEQ ID NO: 49725 - DNA, 20 bp, Human papillomavirus type 10
ccaaagtagagggcaccacc

SEQ ID NO: 49726 - DNA, 20 bp, Human papillomavirus type 10
gcagatcgcattttgcagtg

SEQ ID NO: 49727 - DNA, 20 bp, Human papillomavirus type 10
tgcagtggggtagccttggt

SEQ ID NO: 49728 - DNA, 20 bp, Human papillomavirus type 10
gcagtggggtagccttggtg

SEQ ID NO: 49729 - DNA, 20 bp, Human papillomavirus type 10
tctggtactagtggctttga

SEQ ID NO: 49730 - DNA, 20 bp, Human papillomavirus type 10
ctggtactagtggctttgaa

SEQ ID NO: 49731 - DNA, 20 bp, Human papillomavirus type 10
tggtactagtggctttgaag

SEQ ID NO: 49732 - DNA, 20 bp, Human papillomavirus type 10
gaagttacatcctctgccac

SEQ ID NO: 49733 - DNA, 20 bp, Human papillomavirus type 10
aagttacatcctctgccaca

SEQ ID NO: 49734 - DNA, 20 bp, Human papillomavirus type 10
gccctatagccccaatcgag

SEQ ID NO: 49735 - DNA, 20 bp, Human papillomavirus type 10
aaatggaacctttacttgct

SEQ ID NO: 49736 - DNA, 20 bp, Human papillomavirus type 10
acttgctccagctgcctctg

SEQ ID NO: 49737 - DNA, 20 bp, Human papillomavirus type 10
cttgctccagctgcctctga

SEQ ID NO: 49738 - DNA, 20 bp, Human papillomavirus type 10
ctccagctgcctctgacact

SEQ ID NO: 49739 - DNA, 20 bp, Human papillomavirus type 10
gtgtacctgcctcccactcc

SEQ ID NO: 49740 - DNA, 20 bp, Human papillomavirus type 10
tcagcacggacgactatgtg

SEQ ID NO: 49741 - DNA, 20 bp, Human papillomavirus type 10
actattatgcaggcacttca

SEQ ID NO: 49742 - DNA, 20 bp, Human papillomavirus type 10
ctattatgcaggcacttcac

SEQ ID NO: 49743 - DNA, 20 bp, Human papillomavirus type 10
gtgcgtgtcacatagtcgtc

SEQ ID NO: 49744 - DNA, 20 bp, Human papillomavirus type 10
actgctttacaattaaataa

SEQ ID NO: 49745 - DNA, 20 bp, Human papillomavirus type 10
ctgctttacaattaaataag

SEQ ID NO: 49746 - DNA, 20 bp, Human papillomavirus type 10
acaattaaataagtctgacg

SEQ ID NO: 49747 - DNA, 20 bp, Human papillomavirus type 10
caattaaataagtctgacgt

SEQ ID NO: 49748 - DNA, 20 bp, Human papillomavirus type 10
aataagtctgacgtgcctat

SEQ ID NO: 49749 - DNA, 20 bp, Human papillomavirus type 10
ttcagttgtgtaaggtaaca

SEQ ID NO: 49750 - DNA, 20 bp, Human papillomavirus type 10
tcagttgtgtaaggtaacat

SEQ ID NO: 49751 - DNA, 20 bp, Human papillomavirus type 10
cagttgtgtaaggtaacatt

SEQ ID NO: 49752 - DNA, 20 bp, Human papillomavirus type 10
agttgtgtaaggtaacattg

SEQ ID NO: 49753 - DNA, 20 bp, Human papillomavirus type 10
tgtaaggtaacattgacccc

SEQ ID NO: 49754 - DNA, 20 bp, Human papillomavirus type 10
gtcacatagttttatatttt

SEQ ID NO: 49755 - DNA, 20 bp, Human papillomavirus type 10
tcacatagttttatattttt

SEQ ID NO: 49756 - DNA, 20 bp, Human papillomavirus type 10
tatattttttaatttgtgta

SEQ ID NO: 49757 - DNA, 20 bp, Human papillomavirus type 10
atattttttaatttgtgtaa

SEQ ID NO: 49758 - DNA, 20 bp, Human papillomavirus type 10
tattttttaatttgtgtaat

SEQ ID NO: 49759 - DNA, 20 bp, Human papillomavirus type 184
ccatttagagttgaaacgag

SEQ ID NO: 49760 - DNA, 20 bp, Human papillomavirus type 184
agagttgaaacgagttgtaa

SEQ ID NO: 49761 - DNA, 20 bp, Human papillomavirus type 184
gagttgaaacgagttgtaag

SEQ ID NO: 49762 - DNA, 20 bp, Human papillomavirus type 184
aaacgagttgtaagtcctgt

SEQ ID NO: 49763 - DNA, 20 bp, Human papillomavirus type 184
taagtcctgtgggacaggtg

SEQ ID NO: 49764 - DNA, 20 bp, Human papillomavirus type 184
gaaaaaagctcagactctga

SEQ ID NO: 49765 - DNA, 20 bp, Human papillomavirus type 184
aaaaaagctcagactctgat

SEQ ID NO: 49766 - DNA, 20 bp, Human papillomavirus type 184
cctggcactgtacaacaaac

SEQ ID NO: 49767 - DNA, 20 bp, Human papillomavirus type 184
cctgtttgttgtacagtgcc

SEQ ID NO: 49768 - DNA, 20 bp, Human papillomavirus type 184
gttgtacagtgccagggaat

SEQ ID NO: 49769 - DNA, 20 bp, Human papillomavirus type 184
actttgatgaaaatcctgca

SEQ ID NO: 49770 - DNA, 20 bp, Human papillomavirus type 184
ctttgatgaaaatcctgcaa

SEQ ID NO: 49771 - DNA, 20 bp, Human papillomavirus type 184
gatgaaaatcctgcaaatgt

SEQ ID NO: 49772 - DNA, 20 bp, Human papillomavirus type 184
atgaaaatcctgcaaatgtg

SEQ ID NO: 49773 - DNA, 20 bp, Human papillomavirus type 184
ccttatacaaactgggactc

SEQ ID NO: 49774 - DNA, 20 bp, Human papillomavirus type 184
acgagccagccgaaaccacc

SEQ ID NO: 49775 - DNA, 20 bp, Human papillomavirus type 184
gcggtggggtagaggggtat

SEQ ID NO: 49776 - DNA, 20 bp, Human papillomavirus type 184
cggtggggtagaggggtatg

SEQ ID NO: 49777 - DNA, 20 bp, Human papillomavirus type 184
cggctggctcgtcaacaggc

SEQ ID NO: 49778 - DNA, 20 bp, Human papillomavirus type 184
ggctggctcgtcaacaggct

SEQ ID NO: 49779 - DNA, 20 bp, Human papillomavirus type 184
agcccggttggagtctgtcc

SEQ ID NO: 49780 - DNA, 20 bp, Human papillomavirus type 184
gagtctgtcccagctcctga

SEQ ID NO: 49781 - DNA, 20 bp, Human papillomavirus type 184
cgtcaacaggtttatcaaga

SEQ ID NO: 49782 - DNA, 20 bp, Human papillomavirus type 184
atcaagacttggaagacttc

SEQ ID NO: 49783 - DNA, 20 bp, Human papillomavirus type 184
tcaagacttggaagacttca

SEQ ID NO: 49784 - DNA, 20 bp, Human papillomavirus type 184
gaacgggtaaaggcactggt

SEQ ID NO: 49785 - DNA, 20 bp, Human papillomavirus type 184
ttcatcgttagctccatcta

SEQ ID NO: 49786 - DNA, 20 bp, Human papillomavirus type 184
atcgttagctccatctatta

SEQ ID NO: 49787 - DNA, 20 bp, Human papillomavirus type 184
gctccatctattacacgccc

SEQ ID NO: 49788 - DNA, 20 bp, Human papillomavirus type 184
cacgccctttgcctaaacca

SEQ ID NO: 49789 - DNA, 20 bp, Human papillomavirus type 184
gcaagaagaagtaggtgaaa

SEQ ID NO: 49790 - DNA, 20 bp, Human papillomavirus type 184
caagaagaagtaggtgaaac

SEQ ID NO: 49791 - DNA, 20 bp, Human papillomavirus type 184
tcactgctgatccaggaaca

SEQ ID NO: 49792 - DNA, 20 bp, Human papillomavirus type 184
ggtggtggggaggtagtcac

SEQ ID NO: 49793 - DNA, 20 bp, Human papillomavirus type 184
ctggatcagcagtgataact

SEQ ID NO: 49794 - DNA, 20 bp, Human papillomavirus type 184
aatttgaatttgaaaatccc

SEQ ID NO: 49795 - DNA, 20 bp, Human papillomavirus type 184
gaatttgaaaatcccgcctt

SEQ ID NO: 49796 - DNA, 20 bp, Human papillomavirus type 184
aatttgaaaatcccgccttt

SEQ ID NO: 49797 - DNA, 20 bp, Human papillomavirus type 184
gaaaatcccgcctttgatga

SEQ ID NO: 49798 - DNA, 20 bp, Human papillomavirus type 184
aaaatcccgcctttgatgat

SEQ ID NO: 49799 - DNA, 20 bp, Human papillomavirus type 184
gaaaccttttattccctata

SEQ ID NO: 49800 - DNA, 20 bp, Human papillomavirus type 184
aaaccttttattccctatat

SEQ ID NO: 49801 - DNA, 20 bp, Human papillomavirus type 184
tattccctatatacattttg

SEQ ID NO: 49802 - DNA, 20 bp, Human papillomavirus type 184
attccctatatacattttgg

SEQ ID NO: 49803 - DNA, 20 bp, Human papillomavirus type 184
ttccctatatacattttgga

SEQ ID NO: 49804 - DNA, 20 bp, Human papillomavirus type 184
agtacggatgaatatgtaga

SEQ ID NO: 49805 - DNA, 20 bp, Human papillomavirus type 184
atttttatgctggatctgaa

SEQ ID NO: 49806 - DNA, 20 bp, Human papillomavirus type 184
tttttatgctggatctgaaa

SEQ ID NO: 49807 - DNA, 20 bp, Human papillomavirus type 184
ttatgctggatctgaaaggc

SEQ ID NO: 49808 - DNA, 20 bp, Human papillomavirus type 184
tatgctggatctgaaaggct

SEQ ID NO: 49809 - DNA, 20 bp, Human papillomavirus type 184
caaattggaagaggcggtcc

SEQ ID NO: 49810 - DNA, 20 bp, Human papillomavirus type 184
gaagaggcggtccaataggt

SEQ ID NO: 49811 - DNA, 20 bp, Human papillomavirus type 184
gtacatcaggtcatcccttg

SEQ ID NO: 49812 - DNA, 20 bp, Human papillomavirus type 184
tttaataagtataatgatac

SEQ ID NO: 49813 - DNA, 20 bp, Human papillomavirus type 184
aataagtataatgatacaga

SEQ ID NO: 49814 - DNA, 20 bp, Human papillomavirus type 184
tcctcctatacaactagttc

SEQ ID NO: 49815 - DNA, 20 bp, Human papillomavirus type 184
atactactattcaggatggt

SEQ ID NO: 49816 - DNA, 20 bp, Human papillomavirus type 184
aggatggtgacatgtgtgat

SEQ ID NO: 49817 - DNA, 20 bp, Human papillomavirus type 184
ggagctgcaaattttaaaac

SEQ ID NO: 49818 - DNA, 20 bp, Human papillomavirus type 184
gagctgcaaattttaaaaca

SEQ ID NO: 49819 - DNA, 20 bp, Human papillomavirus type 184
atgttagaggaggtgttgat

SEQ ID NO: 49820 - DNA, 20 bp, Human papillomavirus type 184
tgttagaggaggtgttgatg

SEQ ID NO: 49821 - DNA, 20 bp, Human papillomavirus type 184
gaggaggtgttgatggcgat

SEQ ID NO: 49822 - DNA, 20 bp, Human papillomavirus type 184
atggcgatgcattgccatta

SEQ ID NO: 49823 - DNA, 20 bp, Human papillomavirus type 184
ccattaactaactttattta

SEQ ID NO: 49824 - DNA, 20 bp, Human papillomavirus type 184
cggtaagtttttggcgccag

SEQ ID NO: 49825 - DNA, 20 bp, Human papillomavirus type 184
ggtaagtttttggcgccaga

SEQ ID NO: 49826 - DNA, 20 bp, Human papillomavirus type 184
ttggcgccagaggcaaactt

SEQ ID NO: 49827 - DNA, 20 bp, Human papillomavirus type 184
tggcgccagaggcaaactta

SEQ ID NO: 49828 - DNA, 20 bp, Human papillomavirus type 184
ggcgccagaggcaaacttag

SEQ ID NO: 49829 - DNA, 20 bp, Influenza B virus
agacagacaacggtagacca

SEQ ID NO: 49830 - DNA, 20 bp, Influenza B virus
aatacatcaagaattgaaaa

SEQ ID NO: 49831 - DNA, 20 bp, Influenza B virus
aaaagaacccttcattaaga

SEQ ID NO: 49832 - DNA, 20 bp, Influenza B virus
attaagaatgaagtgggcca

SEQ ID NO: 49833 - DNA, 20 bp, Influenza B virus
agaatgaagtgggccatgtg

SEQ ID NO: 49834 - DNA, 20 bp, Influenza B virus
gaaaaggtctacgaaagctt

SEQ ID NO: 49835 - DNA, 20 bp, Influenza B virus
aaaaggtctacgaaagcttt

SEQ ID NO: 49836 - DNA, 20 bp, Influenza B virus
tttctcagaaagatgagact

SEQ ID NO: 49837 - DNA, 20 bp, Influenza B virus
ttctcagaaagatgagactt

SEQ ID NO: 49838 - DNA, 20 bp, Influenza B virus
tctcagaaagatgagacttg

SEQ ID NO: 49839 - DNA, 20 bp, Influenza B virus
aagggaacgatgataactcc

SEQ ID NO: 49840 - DNA, 20 bp, Influenza B virus
tactggcatacatgcttgag

SEQ ID NO: 49841 - DNA, 20 bp, Influenza B virus
agagagaactagttgcccga

SEQ ID NO: 49842 - DNA, 20 bp, Influenza B virus
ttcgggcaactagttctctc

SEQ ID NO: 49843 - DNA, 20 bp, Influenza B virus
gggcaactagttctctctca

SEQ ID NO: 49844 - DNA, 20 bp, Influenza B virus
catcaaacccactagagcta

SEQ ID NO: 49845 - DNA, 20 bp, Influenza B virus
caaataagactgtgatagac

SEQ ID NO: 49846 - DNA, 20 bp, Influenza B virus
aaaatcatgtctggcagccc

SEQ ID NO: 49847 - DNA, 20 bp, Influenza B virus
aaatcatgtctggcagccct

SEQ ID NO: 49848 - DNA, 20 bp, Influenza B virus
taaaggttcagtgtctatca

SEQ ID NO: 49849 - DNA, 20 bp, Influenza B virus
catgtaagatgtggcgaatg

SEQ ID NO: 49850 - DNA, 20 bp, Influenza B virus
aaaaaaagccaaatgagaat

SEQ ID NO: 49851 - DNA, 20 bp, Influenza B virus
agccaaaaaggaggacatga

SEQ ID NO: 49852 - DNA, 20 bp, Influenza B virus
ttaaatctttcatgtcctcc

SEQ ID NO: 49853 - DNA, 20 bp, Influenza B virus
aatctttcatgtcctccttt

SEQ ID NO: 49854 - DNA, 20 bp, Influenza B virus
ctgaataggagcaatgacct

SEQ ID NO: 49855 - DNA, 20 bp, Influenza B virus
tgaataggagcaatgacctt

SEQ ID NO: 49856 - DNA, 20 bp, Influenza B virus
ttgatcaatggggatatgag

SEQ ID NO: 49857 - DNA, 20 bp, Influenza B virus
tgatcaatggggatatgagg

SEQ ID NO: 49858 - DNA, 20 bp, Influenza B virus
gatcaatggggatatgagga

SEQ ID NO: 49859 - DNA, 20 bp, Influenza B virus
gaatcacaagcacagctaat

SEQ ID NO: 49860 - DNA, 20 bp, Influenza B virus
gtaagtgttttgtaccagtt

SEQ ID NO: 49861 - DNA, 20 bp, Influenza B virus
tgtaccagttctttggttgt

SEQ ID NO: 49862 - DNA, 20 bp, Influenza B virus
gtaccagttctttggttgtt

SEQ ID NO: 49863 - DNA, 20 bp, Influenza B virus
taccagttctttggttgttc

SEQ ID NO: 49864 - DNA, 20 bp, Influenza B virus
caagagcagtgctcaaacaa

SEQ ID NO: 49865 - DNA, 20 bp, Influenza B virus
tgaaaactgaccaattcata

SEQ ID NO: 49866 - DNA, 20 bp, Influenza B virus
ataaaattgttgcctttctg

SEQ ID NO: 49867 - DNA, 20 bp, Influenza B virus
ttgcctttctgtttttcgcc

SEQ ID NO: 49868 - DNA, 20 bp, Influenza B virus
cctttctgtttttcgccacc

SEQ ID NO: 49869 - DNA, 20 bp, Influenza B virus
cttgttagtggcaaatatga

SEQ ID NO: 49870 - DNA, 20 bp, Influenza B virus
ttgttagtggcaaatatgac

SEQ ID NO: 49871 - DNA, 20 bp, Influenza B virus
ttagtggcaaatatgaccct

SEQ ID NO: 49872 - DNA, 20 bp, Influenza B virus
gtggcaaatatgaccctgat

SEQ ID NO: 49873 - DNA, 20 bp, Influenza B virus
gagatttcaaaaccattgag

SEQ ID NO: 49874 - DNA, 20 bp, Human coronavirus
tcagatctcattaaatctaa

SEQ ID NO: 49875 - DNA, 20 bp, Human coronavirus
aatctaaactttttaaacaa

SEQ ID NO: 49876 - DNA, 20 bp, Human coronavirus
ttaaacaagattccctgtta

SEQ ID NO: 49877 - DNA, 20 bp, Human coronavirus
taaacaagattccctgttat

SEQ ID NO: 49878 - DNA, 20 bp, Human coronavirus
aaacaagattccctgttatc

SEQ ID NO: 49879 - DNA, 20 bp, Human coronavirus
gattcgtttatgataatcat

SEQ ID NO: 49880 - DNA, 20 bp, Human coronavirus
gtttatgataatcatgtgaa

SEQ ID NO: 49881 - DNA, 20 bp, Human coronavirus
atgataatcatgtgaagata

SEQ ID NO: 49882 - DNA, 20 bp, Human coronavirus
tgataatcatgtgaagatag

SEQ ID NO: 49883 - DNA, 20 bp, Human coronavirus
tcgctgcattcttggacaag

SEQ ID NO: 49884 - DNA, 20 bp, Human coronavirus
caggtaatatgatggatggt

SEQ ID NO: 49885 - DNA, 20 bp, Human coronavirus
aggtaatatgatggatggtt

SEQ ID NO: 49886 - DNA, 20 bp, Human coronavirus
ttcttgtccattgtgttgta

SEQ ID NO: 49887 - DNA, 20 bp, Human coronavirus
tcttgtccattgtgttgtac

SEQ ID NO: 49888 - DNA, 20 bp, Human coronavirus
cttgtccattgtgttgtaca

SEQ ID NO: 49889 - DNA, 20 bp, Human coronavirus
aacaaaatcatattcttggc

SEQ ID NO: 49890 - DNA, 20 bp, Human coronavirus
ttggcgttaataattcttgg

SEQ ID NO: 49891 - DNA, 20 bp, Human coronavirus
gcgttaataattcttggtgt

SEQ ID NO: 49892 - DNA, 20 bp, Human coronavirus
ataattcttggtgtaggcaa

SEQ ID NO: 49893 - DNA, 20 bp, Human coronavirus
ttggtgtaggcaactgttgc

SEQ ID NO: 49894 - DNA, 20 bp, Human coronavirus
gtattatagataatatgtac

SEQ ID NO: 49895 - DNA, 20 bp, Human coronavirus
tattatagataatatgtaca

SEQ ID NO: 49896 - DNA, 20 bp, Human coronavirus
tagataatatgtacatgggt

SEQ ID NO: 49897 - DNA, 20 bp, Human coronavirus
ttccctattgtcatgaatga

SEQ ID NO: 49898 - DNA, 20 bp, Human coronavirus
tccctattgtcatgaatgat

SEQ ID NO: 49899 - DNA, 20 bp, Human coronavirus
tgttaaaggtgatattataa

SEQ ID NO: 49900 - DNA, 20 bp, Human coronavirus
gttaaaggtgatattataaa

SEQ ID NO: 49901 - DNA, 20 bp, Human coronavirus
ttaaaggtgatattataaat

SEQ ID NO: 49902 - DNA, 20 bp, Human coronavirus
aaggtgatattataaatgtt

SEQ ID NO: 49903 - DNA, 20 bp, Human coronavirus
taaatgttgctagacttgtt

SEQ ID NO: 49904 - DNA, 20 bp, Human coronavirus
ttatgtgaatgtagcttgtc

SEQ ID NO: 49905 - DNA, 20 bp, Human coronavirus
tgtgaatgtagcttgtctta

SEQ ID NO: 49906 - DNA, 20 bp, Human coronavirus
tcttatgttgcagcatatta

SEQ ID NO: 49907 - DNA, 20 bp, Human coronavirus
tgttgcagcatattaatctt

SEQ ID NO: 49908 - DNA, 20 bp, Human coronavirus
cagcatattaatcttaaatt

SEQ ID NO: 49909 - DNA, 20 bp, Human coronavirus
ttaatggttataagattggc

SEQ ID NO: 49910 - DNA, 20 bp, Human coronavirus
taatggttataagattggct

SEQ ID NO: 49911 - DNA, 20 bp, Human coronavirus
aatggttataagattggctg

SEQ ID NO: 49912 - DNA, 20 bp, Human coronavirus
atggttataagattggctgt

SEQ ID NO: 49913 - DNA, 20 bp, Human coronavirus
taagattggctgtaattgtg

SEQ ID NO: 49914 - DNA, 20 bp, Human coronavirus
atactaactttaagttagtt

SEQ ID NO: 49915 - DNA, 20 bp, Human coronavirus
tactaactttaagttagttg

SEQ ID NO: 49916 - DNA, 20 bp, Human coronavirus
aagttagttggacatgatat

SEQ ID NO: 49917 - DNA, 20 bp, Human coronavirus
agttagttggacatgatatt

SEQ ID NO: 49918 - DNA, 20 bp, Human coronavirus
gttggacatgatatttgtgc

SEQ ID NO: 49919 - DNA, 20 bp, Human coronavirus
gttttattaggcatattgtc

SEQ ID NO: 49920 - DNA, 20 bp, Human coronavirus
tattaggcatattgtctatg

SEQ ID NO: 49921 - DNA, 20 bp, Human coronavirus
attaggcatattgtctatgg

SEQ ID NO: 49922 - DNA, 20 bp, Human coronavirus
ttaggcatattgtctatggt

SEQ ID NO: 49923 - DNA, 20 bp, Human coronavirus
ggcatattgtctatggttgt

SEQ ID NO: 49924 - DNA, 20 bp, Human coronavirus
tagatacttttgtgggatgt

SEQ ID NO: 49925 - DNA, 20 bp, Human coronavirus
agatacttttgtgggatgtg

SEQ ID NO: 49926 - DNA, 20 bp, Human coronavirus
gatacttttgtgggatgtgt

SEQ ID NO: 49927 - DNA, 20 bp, Human coronavirus
tgtgggatgtgtacgtaaat

SEQ ID NO: 49928 - DNA, 20 bp, Human coronavirus
gtgggatgtgtacgtaaatg

SEQ ID NO: 49929 - DNA, 20 bp, Human coronavirus
ttgttattcagatggtgtta

SEQ ID NO: 49930 - DNA, 20 bp, Human coronavirus
ttattcagatggtgttatga

SEQ ID NO: 49931 - DNA, 20 bp, Human coronavirus
ttcagatggtgttatgaaga

SEQ ID NO: 49932 - DNA, 20 bp, Human coronavirus
agatggtgttatgaagaatg

SEQ ID NO: 49933 - DNA, 20 bp, Human coronavirus
tgaagaatgcttctttgtat

SEQ ID NO: 49934 - DNA, 20 bp, Human coronavirus
aacagttgtgtcttaccaga

SEQ ID NO: 49935 - DNA, 20 bp, Human coronavirus
acagttgtgtcttaccagat

SEQ ID NO: 49936 - DNA, 20 bp, Human coronavirus
tgtcttaccagatgcagggc

SEQ ID NO: 49937 - DNA, 20 bp, Human coronavirus
ccagatgcagggctgtcaac

SEQ ID NO: 49938 - DNA, 20 bp, Human coronavirus
ttttgacagtctctttacaa

SEQ ID NO: 49939 - DNA, 20 bp, Human coronavirus
tacagttgccagttaaggac

SEQ ID NO: 49940 - DNA, 20 bp, Human coronavirus
ccagttaaggactacgtcca

SEQ ID NO: 49941 - DNA, 20 bp, Human coronavirus
aggactacgtccagactgtt

SEQ ID NO: 49942 - DNA, 20 bp, Human coronavirus
atgttattgcttggctctat

SEQ ID NO: 49943 - DNA, 20 bp, Human coronavirus
ttgcttggctctatgcagct

SEQ ID NO: 49944 - DNA, 20 bp, Human coronavirus
aacgtatggcagacctagca

SEQ ID NO: 49945 - DNA, 20 bp, Human coronavirus
ctaacatgtataaagaggct

SEQ ID NO: 49946 - DNA, 20 bp, Human coronavirus
atgataagaagagtaaagtt

SEQ ID NO: 49947 - DNA, 20 bp, Human coronavirus
tttccgctttgcagacaatg

SEQ ID NO: 49948 - DNA, 20 bp, Human coronavirus
ccgctttgcagacaatgctt

SEQ ID NO: 49949 - DNA, 20 bp, Human coronavirus
ctattaaacctgaggctact

SEQ ID NO: 49950 - DNA, 20 bp, Human coronavirus
aacctgaggctactattaac

SEQ ID NO: 49951 - DNA, 20 bp, Human coronavirus
accaagattcttatggtggt

SEQ ID NO: 49952 - DNA, 20 bp, Human coronavirus
ttatggtggtgcctcagttt

SEQ ID NO: 49953 - DNA, 20 bp, Human coronavirus
tggtggtgcctcagtttgta

SEQ ID NO: 49954 - DNA, 20 bp, Human coronavirus
gttgaagtaggtttagttgg

SEQ ID NO: 49955 - DNA, 20 bp, Human coronavirus
aagtaggtttagttggtgtt

SEQ ID NO: 49956 - DNA, 20 bp, Human coronavirus
agttggtgttttaactttag

SEQ ID NO: 49957 - DNA, 20 bp, Human coronavirus
gttggtgttttaactttaga

SEQ ID NO: 49958 - DNA, 20 bp, Human coronavirus
gtgttttaactttagataac

SEQ ID NO: 49959 - DNA, 20 bp, Human coronavirus
ccattacaaagagttaggtg

SEQ ID NO: 49960 - DNA, 20 bp, Human coronavirus
caaagagttaggtgtagtta

SEQ ID NO: 49961 - DNA, 20 bp, Human coronavirus
ggtgtagttatgaacttaga

SEQ ID NO: 49962 - DNA, 20 bp, Human coronavirus
tgaacttagatgttgacaca

SEQ ID NO: 49963 - DNA, 20 bp, Human coronavirus
gatgttgacacacaccgtta

SEQ ID NO: 49964 - DNA, 20 bp, Human coronavirus
tcatttgaggaacagaatga

SEQ ID NO: 49965 - DNA, 20 bp, Human coronavirus
gaggaacagaatgaaattta

SEQ ID NO: 49966 - DNA, 20 bp, Human coronavirus
aggaacagaatgaaatttat

SEQ ID NO: 49967 - DNA, 20 bp, Human coronavirus
atgcatatactaaacgtaat

SEQ ID NO: 49968 - DNA, 20 bp, Human coronavirus
tgcatatactaaacgtaatg

SEQ ID NO: 49969 - DNA, 20 bp, Human coronavirus
tcctaaatgtgatcgtgcta

SEQ ID NO: 49970 - DNA, 20 bp, Human coronavirus
tgcgtattgttagtagttta

SEQ ID NO: 49971 - DNA, 20 bp, Human coronavirus
gcgtattgttagtagtttag

SEQ ID NO: 49972 - DNA, 20 bp, Human coronavirus
cgtattgttagtagtttagt

SEQ ID NO: 49973 - DNA, 20 bp, Human coronavirus
ttagtagtttagttttggcc

SEQ ID NO: 49974 - DNA, 20 bp, Human coronavirus
ttttgttgatgatttattga

SEQ ID NO: 49975 - DNA, 20 bp, Human coronavirus
tgttgatgatttattgaaga

SEQ ID NO: 49976 - DNA, 20 bp, Human coronavirus
gttgatgatttattgaagac

SEQ ID NO: 49977 - DNA, 20 bp, Human coronavirus
ttgatgatttattgaagact

SEQ ID NO: 49978 - DNA, 20 bp, Human coronavirus
atgatttattgaagactgac

SEQ ID NO: 49979 - DNA, 20 bp, Human coronavirus
tatagatgattttaataaga

SEQ ID NO: 49980 - DNA, 20 bp, Human coronavirus
taataagatagctagttgta

SEQ ID NO: 49981 - DNA, 20 bp, Human coronavirus
aataagatagctagttgtaa

SEQ ID NO: 49982 - DNA, 20 bp, Human coronavirus
ataagatagctagttgtaaa

SEQ ID NO: 49983 - DNA, 20 bp, Human coronavirus
taaatggacagaagttgatg

SEQ ID NO: 49984 - DNA, 20 bp, Human coronavirus
tctagtgtttatagtgttcc

SEQ ID NO: 49985 - DNA, 20 bp, Human coronavirus
ctagtgtttatagtgttcca

SEQ ID NO: 49986 - DNA, 20 bp, Human coronavirus
tagtgtttatagtgttccat

SEQ ID NO: 49987 - DNA, 20 bp, Human coronavirus
atagtgttccattggtgttt

SEQ ID NO: 49988 - DNA, 20 bp, Human coronavirus
tagtgttccattggtgtttc

SEQ ID NO: 49989 - DNA, 20 bp, Human coronavirus
gttttgatgttgagggcgct

SEQ ID NO: 49990 - DNA, 20 bp, Human coronavirus
tgatgttgagggcgctcatg

SEQ ID NO: 49991 - DNA, 20 bp, Human coronavirus
gatgttgagggcgctcatgc

SEQ ID NO: 49992 - DNA, 20 bp, Human coronavirus
atgttgagggcgctcatgct

SEQ ID NO: 49993 - DNA, 20 bp, Human coronavirus
agggcgctcatgctactcgc

SEQ ID NO: 49994 - DNA, 20 bp, Human coronavirus
aagctgccatgctatgtaat

SEQ ID NO: 49995 - DNA, 20 bp, Human coronavirus
tgttatgacataggcaatcc

SEQ ID NO: 49996 - DNA, 20 bp, Human coronavirus
tgacataggcaatcctaaag

SEQ ID NO: 49997 - DNA, 20 bp, Human coronavirus
agcttgtgtcaaagattatg

SEQ ID NO: 49998 - DNA, 20 bp, Human coronavirus
gcttgtgtcaaagattatga

SEQ ID NO: 49999 - DNA, 20 bp, Human coronavirus
tgtgtacgtagatggtttag

SEQ ID NO: 50000 - DNA, 20 bp, Human coronavirus
agaatctaaacaagttgatt

SEQ ID NO: 50001 - DNA, 20 bp, Human coronavirus
gaatctaaacaagttgatta

SEQ ID NO: 50002 - DNA, 20 bp, Human coronavirus
attacgttcctttaagaagc

SEQ ID NO: 50003 - DNA, 20 bp, Human coronavirus
cgttcctttaagaagcgcca

SEQ ID NO: 50004 - DNA, 20 bp, Human coronavirus
aaatggtgtgattgtggata

SEQ ID NO: 50005 - DNA, 20 bp, Human coronavirus
aatggtgtgattgtggataa

SEQ ID NO: 50006 - DNA, 20 bp, Human coronavirus
tggataaagttggagaactc

SEQ ID NO: 50007 - DNA, 20 bp, Human coronavirus
gagaactcaaagttgagttt

SEQ ID NO: 50008 - DNA, 20 bp, Human coronavirus
agttttggttcgctatgaga

SEQ ID NO: 50009 - DNA, 20 bp, Human coronavirus
ctaagtacactcaattatgt

SEQ ID NO: 50010 - DNA, 20 bp, Human coronavirus
tgtcagtatttgaatactac

SEQ ID NO: 50011 - DNA, 20 bp, Human coronavirus
gaatactacaacattagctg

SEQ ID NO: 50012 - DNA, 20 bp, Human coronavirus
aatactacaacattagctgt

SEQ ID NO: 50013 - DNA, 20 bp, Human coronavirus
gctgttcctgttaatatgcg

SEQ ID NO: 50014 - DNA, 20 bp, Human coronavirus
caagagtcataaaccacctt

SEQ ID NO: 50015 - DNA, 20 bp, Human coronavirus
tgcttcctgtcctattggta

SEQ ID NO: 50016 - DNA, 20 bp, Human coronavirus
ctgtcctattggtactaatt

SEQ ID NO: 50017 - DNA, 20 bp, Human coronavirus
gtactaattatcgttcttgt

SEQ ID NO: 50018 - DNA, 20 bp, Human coronavirus
tcgttcttgtgagagtacta

SEQ ID NO: 50019 - DNA, 20 bp, Human coronavirus
gcatgggtagtggtttttgt

SEQ ID NO: 50020 - DNA, 20 bp, Human coronavirus
ttgtgttgattataactcac

SEQ ID NO: 50021 - DNA, 20 bp, Human coronavirus
tgtgttgattataactcacc

SEQ ID NO: 50022 - DNA, 20 bp, Human coronavirus
gtgttgattataactcacct

SEQ ID NO: 50023 - DNA, 20 bp, Human coronavirus
tgttgattataactcacctt

SEQ ID NO: 50024 - DNA, 20 bp, Human coronavirus
agaggctcaggttcagattg

SEQ ID NO: 50025 - DNA, 20 bp, Human coronavirus
gaggctcaggttcagattga

SEQ ID NO: 50026 - DNA, 20 bp, Human coronavirus
agattgataggcttattaat

SEQ ID NO: 50027 - DNA, 20 bp, Human coronavirus
ataggcttattaatggtcgt

SEQ ID NO: 50028 - DNA, 20 bp, Human coronavirus
ttaatggtcgtttaactgct

SEQ ID NO: 50029 - DNA, 20 bp, Human coronavirus
gttaggccagttattgagga

SEQ ID NO: 50030 - DNA, 20 bp, Human coronavirus
ttaggccagttattgaggac

SEQ ID NO: 50031 - DNA, 20 bp, Human coronavirus
ggccagttattgaggactat

SEQ ID NO: 50032 - DNA, 20 bp, Human coronavirus
ttgaggactatcacacatta

SEQ ID NO: 50033 - DNA, 20 bp, Human coronavirus
aggactatcacacattaact

SEQ ID NO: 50034 - DNA, 20 bp, Human coronavirus
aggaatcctcaagaaaactt

SEQ ID NO: 50035 - DNA, 20 bp, Human coronavirus
ttgggctgaccaatctgagc

SEQ ID NO: 50036 - DNA, 20 bp, Human coronavirus
ggctgaccaatctgagcgaa

SEQ ID NO: 50037 - DNA, 20 bp, Human coronavirus
ccaaacctttaatagaggca

SEQ ID NO: 50038 - DNA, 20 bp, Human coronavirus
aatagaggcagaaaaaccca

SEQ ID NO: 50039 - DNA, 20 bp, Human coronavirus
taacaaaacctcgccaaaag

SEQ ID NO: 50040 - DNA, 20 bp, Human coronavirus
aacaaaacctcgccaaaagc

SEQ ID NO: 50041 - DNA, 20 bp, Human coronavirus
acaaaacctcgccaaaagcg

SEQ ID NO: 50042 - DNA, 20 bp, Human coronavirus
taatgttcaacagtgttttg

SEQ ID NO: 50043 - DNA, 20 bp, Human coronavirus
aacagtgttttggtaaaaga

SEQ ID NO: 50044 - DNA, 20 bp, Human coronavirus
gttgagttctaaacctcagc

SEQ ID NO: 50045 - DNA, 20 bp, Human coronavirus
agttctaaacctcagcgtaa

SEQ ID NO: 50046 - DNA, 20 bp, Human coronavirus
taaacctcagcgtaaaagag

SEQ ID NO: 50047 - DNA, 20 bp, Human coronavirus
aacaattaccagaacagttt

SEQ ID NO: 50048 - DNA, 20 bp, Human coronavirus
ccagaacagtttgactctct

SEQ ID NO: 50049 - DNA, 20 bp, Influenza A virus
aacccgatgattgtcgaact

SEQ ID NO: 50050 - DNA, 20 bp, Influenza A virus
tcgaacttgcagaaaaagca

SEQ ID NO: 50051 - DNA, 20 bp, Influenza A virus
cagaaaaagcaatgaaagag

SEQ ID NO: 50052 - DNA, 20 bp, Influenza A virus
aaacaaacaaatttgcagca

SEQ ID NO: 50053 - DNA, 20 bp, Influenza A virus
gcagcaatatgcacccactt

SEQ ID NO: 50054 - DNA, 20 bp, Influenza A virus
aaaccaggctatttaccata

SEQ ID NO: 50055 - DNA, 20 bp, Influenza A virus
accataagacaagaaatggc

SEQ ID NO: 50056 - DNA, 20 bp, Influenza A virus
ccataagacaagaaatggcc

SEQ ID NO: 50057 - DNA, 20 bp, Influenza A virus
ctttcgtcagtccgaaagag

SEQ ID NO: 50058 - DNA, 20 bp, Influenza A virus
cgtcagtccgaaagaggcga

SEQ ID NO: 50059 - DNA, 20 bp, Influenza A virus
aaccttttctgaagacaaca

SEQ ID NO: 50060 - DNA, 20 bp, Influenza A virus
tctgaagacaacaccaagac

SEQ ID NO: 50061 - DNA, 20 bp, Influenza A virus
ctgaagacaacaccaagacc

SEQ ID NO: 50062 - DNA, 20 bp, Influenza A virus
tgaagacaacaccaagacca

SEQ ID NO: 50063 - DNA, 20 bp, Influenza A virus
ctaatggacctccttgttat

SEQ ID NO: 50064 - DNA, 20 bp, Influenza A virus
caggacattgaaaatgagga

SEQ ID NO: 50065 - DNA, 20 bp, Influenza A virus
aaaatgaggagaagatccca

SEQ ID NO: 50066 - DNA, 20 bp, Influenza A virus
tcaccaagagcccactttag

SEQ ID NO: 50067 - DNA, 20 bp, Influenza A virus
caccaagagcccactttagt

SEQ ID NO: 50068 - DNA, 20 bp, Influenza A virus
accaagagcccactttagtt

SEQ ID NO: 50069 - DNA, 20 bp, Influenza A virus
gagaggacgtagccccaatt

SEQ ID NO: 50070 - DNA, 20 bp, Influenza A virus
agtacattgcaagcatgagg

SEQ ID NO: 50071 - DNA, 20 bp, Influenza A virus
caagcatgaggaggaattat

SEQ ID NO: 50072 - DNA, 20 bp, Influenza A virus
tttcacagcagaggtgtccc

SEQ ID NO: 50073 - DNA, 20 bp, Influenza A virus
cacagcagaggtgtcccatt

SEQ ID NO: 50074 - DNA, 20 bp, Influenza A virus
tgagcatggagttttctctc

SEQ ID NO: 50075 - DNA, 20 bp, Influenza A virus
tctctcactgacccgagact

SEQ ID NO: 50076 - DNA, 20 bp, Influenza A virus
ctctcactgacccgagactt

SEQ ID NO: 50077 - DNA, 20 bp, Influenza A virus
tctcactgacccgagacttg

SEQ ID NO: 50078 - DNA, 20 bp, Influenza A virus
agccacataaatgggagaaa

SEQ ID NO: 50079 - DNA, 20 bp, Influenza A virus
aagagaaagacatgaccaaa

SEQ ID NO: 50080 - DNA, 20 bp, Influenza A virus
tttgagaataaatcagaagc

SEQ ID NO: 50081 - DNA, 20 bp, Influenza A virus
ttgagaataaatcagaagca

SEQ ID NO: 50082 - DNA, 20 bp, Influenza A virus
tgagaataaatcagaagcat

SEQ ID NO: 50083 - DNA, 20 bp, Influenza A virus
gagaataaatcagaagcatg

SEQ ID NO: 50084 - DNA, 20 bp, Influenza A virus
gaagaatggttggtggaatt

SEQ ID NO: 50085 - DNA, 20 bp, Influenza A virus
gtggaattgggaggttttac

SEQ ID NO: 50086 - DNA, 20 bp, Influenza A virus
ggaggttttacgtacagatg

SEQ ID NO: 50087 - DNA, 20 bp, Influenza A virus
tacgtacagatgtgcactga

SEQ ID NO: 50088 - DNA, 20 bp, Influenza A virus
acgtacagatgtgcactgaa

SEQ ID NO: 50089 - DNA, 20 bp, Influenza A virus
ggatgataaagcgaggcatt

SEQ ID NO: 50090 - DNA, 20 bp, Influenza A virus
atgaccggaacttctggaga

SEQ ID NO: 50091 - DNA, 20 bp, Influenza A virus
tggagaggcgataatggacg

SEQ ID NO: 50092 - DNA, 20 bp, Influenza A virus
cacattctctcatatgcaat

SEQ ID NO: 50093 - DNA, 20 bp, Influenza A virus
tctcatatgcaatccttgtt

SEQ ID NO: 50094 - DNA, 20 bp, Influenza A virus
aagatctcatctttctggca

SEQ ID NO: 50095 - DNA, 20 bp, Influenza A virus
ctggcacggtctgcactcat

SEQ ID NO: 50096 - DNA, 20 bp, Influenza A virus
tggcacggtctgcactcatc

SEQ ID NO: 50097 - DNA, 20 bp, Influenza A virus
cctgcttgtgtgtacgggct

SEQ ID NO: 50098 - DNA, 20 bp, Influenza A virus
tgggctacggatcctctcag

SEQ ID NO: 50099 - DNA, 20 bp, Influenza A virus
gaggacctgagagtctcaag

SEQ ID NO: 50100 - DNA, 20 bp, Influenza A virus
aggacctgagagtctcaagt

SEQ ID NO: 50101 - DNA, 20 bp, Influenza A virus
cattagaggaacaagagtga

SEQ ID NO: 50102 - DNA, 20 bp, Influenza A virus
attagaggaacaagagtgat

SEQ ID NO: 50103 - DNA, 20 bp, Influenza A virus
gaggaacaagagtgatccca

SEQ ID NO: 50104 - DNA, 20 bp, Human papillomavirus type 132
gattatatgttgtcgcgtcg

SEQ ID NO: 50105 - DNA, 20 bp, Human papillomavirus type 132
tatgttgtcgcgtcgtcctt

SEQ ID NO: 50106 - DNA, 20 bp, Human papillomavirus type 132
tcgcgtcgtcctttggaata

SEQ ID NO: 50107 - DNA, 20 bp, Human papillomavirus type 132
ggaataagaagctttcagca

SEQ ID NO: 50108 - DNA, 20 bp, Human papillomavirus type 132
gaataagaagctttcagcat

SEQ ID NO: 50109 - DNA, 20 bp, Human papillomavirus type 132
gaaagtctctggaaagagac

SEQ ID NO: 50110 - DNA, 20 bp, Human papillomavirus type 132
ccagagactttcgaagtgga

SEQ ID NO: 50111 - DNA, 20 bp, Human papillomavirus type 132
cagagactttcgaagtggat

SEQ ID NO: 50112 - DNA, 20 bp, Human papillomavirus type 132
cgaagtggatggggtgtccg

SEQ ID NO: 50113 - DNA, 20 bp, Human papillomavirus type 132
gaagtggatggggtgtccgg

SEQ ID NO: 50114 - DNA, 20 bp, Human papillomavirus type 132
caaaacacggtctgtcggga

SEQ ID NO: 50115 - DNA, 20 bp, Human papillomavirus type 132
gacgacttcaagaagaggct

SEQ ID NO: 50116 - DNA, 20 bp, Human papillomavirus type 132
aagaagaggctcgggatccg

SEQ ID NO: 50117 - DNA, 20 bp, Human papillomavirus type 132
attttattaaaaggtcatcc

SEQ ID NO: 50118 - DNA, 20 bp, Human papillomavirus type 132
tattaaaaggtcatcctaat

SEQ ID NO: 50119 - DNA, 20 bp, Human papillomavirus type 132
taggaaatttggacagctta

SEQ ID NO: 50120 - DNA, 20 bp, Human papillomavirus type 132
aggaaatttggacagcttat

SEQ ID NO: 50121 - DNA, 20 bp, Human papillomavirus type 132
ggaaatttggacagcttata

SEQ ID NO: 50122 - DNA, 20 bp, Human papillomavirus type 132
ggacagcttataacatgcct

SEQ ID NO: 50123 - DNA, 20 bp, Human papillomavirus type 132
gacagcttataacatgccta

SEQ ID NO: 50124 - DNA, 20 bp, Human papillomavirus type 132
ggagagggtggtactgggcg

SEQ ID NO: 50125 - DNA, 20 bp, Human papillomavirus type 132
tggtaatacacctgttaaac

SEQ ID NO: 50126 - DNA, 20 bp, Human papillomavirus type 132
ggtaatacacctgttaaacc

SEQ ID NO: 50127 - DNA, 20 bp, Human papillomavirus type 132
gtaatacacctgttaaacca

SEQ ID NO: 50128 - DNA, 20 bp, Human papillomavirus type 132
aaccaaatacagctgtagag

SEQ ID NO: 50129 - DNA, 20 bp, Human papillomavirus type 132
ggaaaggggtgtttctgctg

SEQ ID NO: 50130 - DNA, 20 bp, Human papillomavirus type 132
ctgctgtattggatgtgcag

SEQ ID NO: 50131 - DNA, 20 bp, Human papillomavirus type 132
tgctgtattggatgtgcagc

SEQ ID NO: 50132 - DNA, 20 bp, Human papillomavirus type 132
gatgtgcagcctatacctga

SEQ ID NO: 50133 - DNA, 20 bp, Human papillomavirus type 132
caggtataggctgcacatcc

SEQ ID NO: 50134 - DNA, 20 bp, Human papillomavirus type 132
gagaccactttagttagagc

SEQ ID NO: 50135 - DNA, 20 bp, Human papillomavirus type 132
agttagagccagggaactgt

SEQ ID NO: 50136 - DNA, 20 bp, Human papillomavirus type 132
gttagagccagggaactgta

SEQ ID NO: 50137 - DNA, 20 bp, Human papillomavirus type 132
gagccagggaactgtataat

SEQ ID NO: 50138 - DNA, 20 bp, Human papillomavirus type 132
attatacagttccctggctc

SEQ ID NO: 50139 - DNA, 20 bp, Human papillomavirus type 132
gcaggccacggttaactgag

SEQ ID NO: 50140 - DNA, 20 bp, Human papillomavirus type 132
actgagtatgctccaggggt

SEQ ID NO: 50141 - DNA, 20 bp, Human papillomavirus type 132
gagtgagcagattgggtgaa

SEQ ID NO: 50142 - DNA, 20 bp, Human papillomavirus type 132
ggtgaaactaacactataac

SEQ ID NO: 50143 - DNA, 20 bp, Human papillomavirus type 132
ttatagtgttagtttcaccc

SEQ ID NO: 50144 - DNA, 20 bp, Human papillomavirus type 132
ttccatggatcctaaacaag

SEQ ID NO: 50145 - DNA, 20 bp, Human papillomavirus type 132
tccatggatcctaaacaagt

SEQ ID NO: 50146 - DNA, 20 bp, Human papillomavirus type 132
ccatggatcctaaacaagtt

SEQ ID NO: 50147 - DNA, 20 bp, Human papillomavirus type 132
catggatcctaaacaagttc

SEQ ID NO: 50148 - DNA, 20 bp, Human papillomavirus type 132
agttatttattgtaggatgt

SEQ ID NO: 50149 - DNA, 20 bp, Human papillomavirus type 132
agatttagtggacactttca

SEQ ID NO: 50150 - DNA, 20 bp, Human papillomavirus type 132
gatttagtggacactttcag

SEQ ID NO: 50151 - DNA, 20 bp, Human papillomavirus type 132
agtggacactttcagtatat

SEQ ID NO: 50152 - DNA, 20 bp, Human papillomavirus type 132
gtggacactttcagtatatg

SEQ ID NO: 50153 - DNA, 20 bp, Human papillomavirus type 132
cagtatatggccagattatt

SEQ ID NO: 50154 - DNA, 20 bp, Human papillomavirus type 132
tagctcatatcaatgtaatg

SEQ ID NO: 50155 - DNA, 20 bp, Human papillomavirus type 132
agctcatatcaatgtaatga

SEQ ID NO: 50156 - DNA, 20 bp, Human papillomavirus type 132
gctcatatcaatgtaatgaa

SEQ ID NO: 50157 - DNA, 20 bp, Human papillomavirus type 132
atcaatggcaattagctttt

SEQ ID NO: 50158 - DNA, 20 bp, Human papillomavirus type 132
gcttttgtacctccccctca

SEQ ID NO: 50159 - DNA, 20 bp, Human papillomavirus type 132
aggtaggaaatttttgtatc

SEQ ID NO: 50160 - DNA, 20 bp, Human papillomavirus type 132
ggtaggaaatttttgtatca

SEQ ID NO: 50161 - DNA, 20 bp, Human papillomavirus type 132
ttgtatcagataggcctgct

SEQ ID NO: 50162 - DNA, 20 bp, Human papillomavirus type 132
tgtatcagataggcctgcta

SEQ ID NO: 50163 - DNA, 20 bp, Human papillomavirus type 132
gtatcagataggcctgctaa

SEQ ID NO: 50164 - DNA, 20 bp, Human papillomavirus type 132
actgtggtcagttcttcagt

SEQ ID NO: 50165 - DNA, 20 bp, Human papillomavirus type 132
ctgtggtcagttcttcagta

SEQ ID NO: 50166 - DNA, 20 bp, Human papillomavirus type 132
ttcagtaacagttggtgaaa

SEQ ID NO: 50167 - DNA, 20 bp, Human papillomavirus type 132
agtaacagttggtgaaaact

SEQ ID NO: 50168 - DNA, 20 bp, Human papillomavirus type 132
gtgaaaactaccacttttgg

SEQ ID NO: 50169 - DNA, 20 bp, Influenza A virus
gctgcaatatgcacacattt

SEQ ID NO: 50170 - DNA, 20 bp, Influenza A virus
ctgcaatatgcacacatttg

SEQ ID NO: 50171 - DNA, 20 bp, Influenza A virus
ggaagtttgtttcatgtatt

SEQ ID NO: 50172 - DNA, 20 bp, Influenza A virus
gaagtttgtttcatgtattc

SEQ ID NO: 50173 - DNA, 20 bp, Influenza A virus
gtttcatgtattcggatttc

SEQ ID NO: 50174 - DNA, 20 bp, Influenza A virus
cttcctgatttgtatgatta

SEQ ID NO: 50175 - DNA, 20 bp, Influenza A virus
ttcctgatttgtatgattac

SEQ ID NO: 50176 - DNA, 20 bp, Influenza A virus
ctgatttgtatgattacaaa

SEQ ID NO: 50177 - DNA, 20 bp, Influenza A virus
gtatgattacaaagagaacc

SEQ ID NO: 50178 - DNA, 20 bp, Influenza A virus
tatgattacaaagagaaccg

SEQ ID NO: 50179 - DNA, 20 bp, Influenza A virus
ctttcgtcagtccgaaagag

SEQ ID NO: 50180 - DNA, 20 bp, Influenza A virus
cgtcagtccgaaagaggcga

SEQ ID NO: 50181 - DNA, 20 bp, Influenza A virus
gtcagtccgaaagaggcgaa

SEQ ID NO: 50182 - DNA, 20 bp, Influenza A virus
aagaaaaatttgagattaca

SEQ ID NO: 50183 - DNA, 20 bp, Influenza A virus
gagattacaggaactatgcg

SEQ ID NO: 50184 - DNA, 20 bp, Influenza A virus
aagtgggcactcggtgaaaa

SEQ ID NO: 50185 - DNA, 20 bp, Influenza A virus
gatgactgcaaagatgttgg

SEQ ID NO: 50186 - DNA, 20 bp, Influenza A virus
atgactgcaaagatgttgga

SEQ ID NO: 50187 - DNA, 20 bp, Influenza A virus
gagaccttaaacagtatgac

SEQ ID NO: 50188 - DNA, 20 bp, Influenza A virus
aacagtatgacagtgatgag

SEQ ID NO: 50189 - DNA, 20 bp, Influenza A virus
ccccgattgaacatatcgca

SEQ ID NO: 50190 - DNA, 20 bp, Influenza A virus
aacatatcgcaagcatgagg

SEQ ID NO: 50191 - DNA, 20 bp, Influenza A virus
tacagcagaagtgtcccact

SEQ ID NO: 50192 - DNA, 20 bp, Influenza A virus
acagcagaagtgtcccactg

SEQ ID NO: 50193 - DNA, 20 bp, Influenza A virus
cagcagaagtgtcccactgc

SEQ ID NO: 50194 - DNA, 20 bp, Influenza A virus
tcactcactgacccgagact

SEQ ID NO: 50195 - DNA, 20 bp, Influenza A virus
ttgaaataggagacatgctc

SEQ ID NO: 50196 - DNA, 20 bp, Influenza A virus
aaataggagacatgctcttg

SEQ ID NO: 50197 - DNA, 20 bp, Influenza A virus
aggactgcgataggccaagt

SEQ ID NO: 50198 - DNA, 20 bp, Influenza A virus
gcctatcgcagtcctcaaga

SEQ ID NO: 50199 - DNA, 20 bp, Influenza A virus
tgtcaaagagaaagacatga

SEQ ID NO: 50200 - DNA, 20 bp, Influenza A virus
tttgaaaacaaatcggaaac

SEQ ID NO: 50201 - DNA, 20 bp, Influenza A virus
gaaaacaaatcggaaacatg

SEQ ID NO: 50202 - DNA, 20 bp, Influenza A virus
aaaacaaatcggaaacatgg

SEQ ID NO: 50203 - DNA, 20 bp, Influenza A virus
ggaaagtgtgcaggacctta

SEQ ID NO: 50204 - DNA, 20 bp, Influenza A virus
ttatctatggcacataagaa

SEQ ID NO: 50205 - DNA, 20 bp, Influenza A virus
tctatggcacataagaaagc

SEQ ID NO: 50206 - DNA, 20 bp, Influenza A virus
gatgacaggctccgaagaga

SEQ ID NO: 50207 - DNA, 20 bp, Influenza A virus
atgacaggctccgaagagac

SEQ ID NO: 50208 - DNA, 20 bp, Influenza A virus
cctttaatgccttttggtct

SEQ ID NO: 50209 - DNA, 20 bp, Influenza A virus
tggtgaaaatggaccaagcc

SEQ ID NO: 50210 - DNA, 20 bp, Influenza A virus
ttttatccattatggcttgg

SEQ ID NO: 50211 - DNA, 20 bp, Influenza A virus
tatccattatggcttggtcc

SEQ ID NO: 50212 - DNA, 20 bp, Influenza A virus
atccattatggcttggtcca

SEQ ID NO: 50213 - DNA, 20 bp, Influenza A virus
tccattatggcttggtccat

SEQ ID NO: 50214 - DNA, 20 bp, Influenza A virus
gaatcctcatcggtggactt

SEQ ID NO: 50215 - DNA, 20 bp, Influenza A virus
aatggaatgataactcaatt

SEQ ID NO: 50216 - DNA, 20 bp, Influenza A virus
gagcgtctgaaaatatacag

SEQ ID NO: 50217 - DNA, 20 bp, Influenza A virus
gcttggggaatccatgatga

SEQ ID NO: 50218 - DNA, 20 bp, Influenza A virus
gggaatccatgatgagaatg

SEQ ID NO: 50219 - DNA, 20 bp, Influenza A virus
ccagagaaagagaagagtga

SEQ ID NO: 50220 - DNA, 20 bp, Influenza A virus
cagagaaagagaagagtgag

SEQ ID NO: 50221 - DNA, 20 bp, Influenza A virus
tgcttcttcttccctattgt

SEQ ID NO: 50222 - DNA, 20 bp, Influenza A virus
gcttcttcttccctattgtt

SEQ ID NO: 50223 - DNA, 20 bp, Influenza A virus
cttcttcttccctattgttc

SEQ ID NO: 50224 - DNA, 20 bp, Influenza A virus
tcgaagcactagcaaggagc

SEQ ID NO: 50225 - DNA, 20 bp, Influenza A virus
agcaatctggactccccgtt

SEQ ID NO: 50226 - DNA, 20 bp, Influenza A virus
gagggaatgagaagaaggct

SEQ ID NO: 50227 - DNA, 20 bp, Influenza A virus
gccaatttagccttcttctc

SEQ ID NO: 50228 - DNA, 20 bp, Influenza A virus
ccaatttagccttcttctca

SEQ ID NO: 50229 - DNA, 20 bp, Influenza A virus
ggcagaagaggtacaccaaa

SEQ ID NO: 50230 - DNA, 20 bp, Influenza A virus
cgctctcatagtgaatgcac

SEQ ID NO: 50231 - DNA, 20 bp, Influenza A virus
gctctcatagtgaatgcacc

SEQ ID NO: 50232 - DNA, 20 bp, Influenza A virus
ggtgcattcactatgagagc

SEQ ID NO: 50233 - DNA, 20 bp, Influenza A virus
gtgcattcactatgagagcg

SEQ ID NO: 50234 - DNA, 20 bp, Influenza A virus
ggagtttccggaattaatga

SEQ ID NO: 50235 - DNA, 20 bp, Influenza A virus
gagtttccggaattaatgaa

SEQ ID NO: 50236 - DNA, 20 bp, Influenza A virus
ccggaattaatgaatcggct

SEQ ID NO: 50237 - DNA, 20 bp, Influenza A virus
cggaattaatgaatcggctg

SEQ ID NO: 50238 - DNA, 20 bp, Influenza A virus
atgaatcggctgacatgagc

SEQ ID NO: 50239 - DNA, 20 bp, Influenza A virus
tcaacactagccaaagggga

SEQ ID NO: 50240 - DNA, 20 bp, Influenza A virus
ttgaggatgaacaaatgtac

SEQ ID NO: 50241 - DNA, 20 bp, Influenza A virus
aggatgaacaaatgtaccag

SEQ ID NO: 50242 - DNA, 20 bp, Influenza A virus
gagaaattcttccctagcag

SEQ ID NO: 50243 - DNA, 20 bp, Influenza A virus
ttccctagcagttcatatcg

SEQ ID NO: 50244 - DNA, 20 bp, Human papillomavirus type 85
cagtacatgtaataggatgg

SEQ ID NO: 50245 - DNA, 20 bp, Human papillomavirus type 85
ggcaatccagctacccgacc

SEQ ID NO: 50246 - DNA, 20 bp, Human papillomavirus type 85
gcaatccagctacccgaccc

SEQ ID NO: 50247 - DNA, 20 bp, Human papillomavirus type 85
cataggtctggtagtttgta

SEQ ID NO: 50248 - DNA, 20 bp, Human papillomavirus type 85
gtagggtcgggtagctggat

SEQ ID NO: 50249 - DNA, 20 bp, Human papillomavirus type 85
tgttagatttggaaccatat

SEQ ID NO: 50250 - DNA, 20 bp, Human papillomavirus type 85
gatttggaaccatataatga

SEQ ID NO: 50251 - DNA, 20 bp, Human papillomavirus type 85
ggaaccatataatgaagtgc

SEQ ID NO: 50252 - DNA, 20 bp, Human papillomavirus type 85
gaaccatataatgaagtgca

SEQ ID NO: 50253 - DNA, 20 bp, Human papillomavirus type 85
cacttcattatatggttcca

SEQ ID NO: 50254 - DNA, 20 bp, Human papillomavirus type 85
catgcacaggaagtagaaac

SEQ ID NO: 50255 - DNA, 20 bp, Human papillomavirus type 85
catgccttaaaacgaaagta

SEQ ID NO: 50256 - DNA, 20 bp, Human papillomavirus type 85
aaacgaaagtatggagcaca

SEQ ID NO: 50257 - DNA, 20 bp, Human papillomavirus type 85
tctgtgctgtgtgctccata

SEQ ID NO: 50258 - DNA, 20 bp, Human papillomavirus type 85
ctgtgctgtgtgctccatac

SEQ ID NO: 50259 - DNA, 20 bp, Human papillomavirus type 85
gtgaagtaacaggagacaca

SEQ ID NO: 50260 - DNA, 20 bp, Human papillomavirus type 85
tacaacatggtatagatgac

SEQ ID NO: 50261 - DNA, 20 bp, Human papillomavirus type 85
gacctgtcagaaatgataca

SEQ ID NO: 50262 - DNA, 20 bp, Human papillomavirus type 85
acctgtcagaaatgatacag

SEQ ID NO: 50263 - DNA, 20 bp, Human papillomavirus type 85
tcaaacgcccactgtatcat

SEQ ID NO: 50264 - DNA, 20 bp, Human papillomavirus type 85
cacatacatttccatttgat

SEQ ID NO: 50265 - DNA, 20 bp, Human papillomavirus type 85
ccatttgatagcaatggcaa

SEQ ID NO: 50266 - DNA, 20 bp, Human papillomavirus type 85
catttgatagcaatggcaat

SEQ ID NO: 50267 - DNA, 20 bp, Human papillomavirus type 85
gatagcaatggcaatccagt

SEQ ID NO: 50268 - DNA, 20 bp, Human papillomavirus type 85
atagcaatggcaatccagtg

SEQ ID NO: 50269 - DNA, 20 bp, Human papillomavirus type 85
aaacaataaaccaccacgtg

SEQ ID NO: 50270 - DNA, 20 bp, Human papillomavirus type 85
caaatttcaaaaagcaaagc

SEQ ID NO: 50271 - DNA, 20 bp, Human papillomavirus type 85
aaatttcaaaaagcaaagca

SEQ ID NO: 50272 - DNA, 20 bp, Human papillomavirus type 85
caaaaagcaaagcacatgaa

SEQ ID NO: 50273 - DNA, 20 bp, Human papillomavirus type 85
aaaaagcaaagcacatgaag

SEQ ID NO: 50274 - DNA, 20 bp, Human papillomavirus type 85
ctagagaattacaacacccc

SEQ ID NO: 50275 - DNA, 20 bp, Human papillomavirus type 85
caacaccccaccacaccgta

SEQ ID NO: 50276 - DNA, 20 bp, Human papillomavirus type 85
ggtgcacacggtggtggctt

SEQ ID NO: 50277 - DNA, 20 bp, Human papillomavirus type 85
ggtatacggtgtggtggggt

SEQ ID NO: 50278 - DNA, 20 bp, Human papillomavirus type 85
taattctctagcaattgcag

SEQ ID NO: 50279 - DNA, 20 bp, Human papillomavirus type 85
ttgatgtgtctcctgcaagg

SEQ ID NO: 50280 - DNA, 20 bp, Human papillomavirus type 85
atgtgtctcctgcaaggcca

SEQ ID NO: 50281 - DNA, 20 bp, Human papillomavirus type 85
taattgaatctgtggggcct

SEQ ID NO: 50282 - DNA, 20 bp, Human papillomavirus type 85
aatctgtggggccttcagat

SEQ ID NO: 50283 - DNA, 20 bp, Human papillomavirus type 85
agatccatctattgttacat

SEQ ID NO: 50284 - DNA, 20 bp, Human papillomavirus type 85
ggttattgaggttcctcaaa

SEQ ID NO: 50285 - DNA, 20 bp, Human papillomavirus type 85
ttgaggttcctcaaacaggg

SEQ ID NO: 50286 - DNA, 20 bp, Human papillomavirus type 85
aggttcctcaaacaggggag

SEQ ID NO: 50287 - DNA, 20 bp, Human papillomavirus type 85
ctcaaacaggggaggtgtct

SEQ ID NO: 50288 - DNA, 20 bp, Human papillomavirus type 85
ttattactacccctacatct

SEQ ID NO: 50289 - DNA, 20 bp, Human papillomavirus type 85
tgcctgatcctgattttatg

SEQ ID NO: 50290 - DNA, 20 bp, Human papillomavirus type 85
tatggatattgttcgtttac

SEQ ID NO: 50291 - DNA, 20 bp, Human papillomavirus type 85
atggatattgttcgtttaca

SEQ ID NO: 50292 - DNA, 20 bp, Human papillomavirus type 85
tggatattgttcgtttacat

SEQ ID NO: 50293 - DNA, 20 bp, Human papillomavirus type 85
ttcgtttacataggcctgcc

SEQ ID NO: 50294 - DNA, 20 bp, Human papillomavirus type 85
cgggttacattacctgaccc

SEQ ID NO: 50295 - DNA, 20 bp, Human papillomavirus type 85
gggttacattacctgaccct

SEQ ID NO: 50296 - DNA, 20 bp, Human papillomavirus type 85
cattacctgaccctaataaa

SEQ ID NO: 50297 - DNA, 20 bp, Human papillomavirus type 85
cctgaccctaataaatttgg

SEQ ID NO: 50298 - DNA, 20 bp, Human papillomavirus type 85
ggtcttccagacactaatat

SEQ ID NO: 50299 - DNA, 20 bp, Human papillomavirus type 85
cacacgacactagagataat

SEQ ID NO: 50300 - DNA, 20 bp, Human papillomavirus type 85
taaacaaacccagttatgta

SEQ ID NO: 50301 - DNA, 20 bp, Human papillomavirus type 85
tgtattattggttgtgttcc

SEQ ID NO: 50302 - DNA, 20 bp, Human papillomavirus type 85
ttggttgtgttcctgctatt

SEQ ID NO: 50303 - DNA, 20 bp, Human papillomavirus type 85
gttgtgttcctgctattggg

SEQ ID NO: 50304 - DNA, 20 bp, Human papillomavirus type 85
gtaaatatccagactatttg

SEQ ID NO: 50305 - DNA, 20 bp, Human papillomavirus type 85
taaatatccagactatttgc

SEQ ID NO: 50306 - DNA, 20 bp, Human papillomavirus type 85
gcaaatgtctgcagatgcat

SEQ ID NO: 50307 - DNA, 20 bp, Human papillomavirus type 85
caaatgtctgcagatgcata

SEQ ID NO: 50308 - DNA, 20 bp, Human papillomavirus type 85
ttttgtttacgacgcgaaca

SEQ ID NO: 50309 - DNA, 20 bp, Influenza A virus
gagagagctcggatgtttta

SEQ ID NO: 50310 - DNA, 20 bp, Influenza A virus
tagtcacaagagaaccctat

SEQ ID NO: 50311 - DNA, 20 bp, Influenza A virus
agtcacaagagaaccctatg

SEQ ID NO: 50312 - DNA, 20 bp, Influenza A virus
gtcacaagagaaccctatgt

SEQ ID NO: 50313 - DNA, 20 bp, Influenza A virus
catgcgacccagatgaatgc

SEQ ID NO: 50314 - DNA, 20 bp, Influenza A virus
atttctgcaacaggccttct

SEQ ID NO: 50315 - DNA, 20 bp, Influenza A virus
ctgcaacaggccttctgttg

SEQ ID NO: 50316 - DNA, 20 bp, Influenza A virus
tgcaacaggccttctgttgt

SEQ ID NO: 50317 - DNA, 20 bp, Influenza A virus
tgttgtaccatactactgca

SEQ ID NO: 50318 - DNA, 20 bp, Influenza A virus
taccatactactgcagatgc

SEQ ID NO: 50319 - DNA, 20 bp, Influenza A virus
aagaatgctcatgttacggg

SEQ ID NO: 50320 - DNA, 20 bp, Influenza A virus
cggggaacgaacaggaatta

SEQ ID NO: 50321 - DNA, 20 bp, Influenza A virus
cctgcacatgcagggacaat

SEQ ID NO: 50322 - DNA, 20 bp, Influenza A virus
gcagggctcaaatagaccag

SEQ ID NO: 50323 - DNA, 20 bp, Influenza A virus
agatagacccagtagcaatg

SEQ ID NO: 50324 - DNA, 20 bp, Influenza A virus
gctagggaggacaataagca

SEQ ID NO: 50325 - DNA, 20 bp, Influenza A virus
aaagtgccaaatgcattgac

SEQ ID NO: 50326 - DNA, 20 bp, Influenza A virus
ggcacttttaacatctcgta

SEQ ID NO: 50327 - DNA, 20 bp, Influenza A virus
gcacttttaacatctcgtat

SEQ ID NO: 50328 - DNA, 20 bp, Influenza A virus
taacatctcgtatccagacc

SEQ ID NO: 50329 - DNA, 20 bp, Influenza A virus
attctgagtgcggggttctt

SEQ ID NO: 50330 - DNA, 20 bp, Influenza A virus
tgagtgcggggttcttctct

SEQ ID NO: 50331 - DNA, 20 bp, Influenza A virus
ttctcttgccttcctgatgt

SEQ ID NO: 50332 - DNA, 20 bp, Influenza A virus
tcttgccttcctgatgtgta

SEQ ID NO: 50333 - DNA, 20 bp, Influenza A virus
ccttcctgatgtgtactttt

SEQ ID NO: 50334 - DNA, 20 bp, Influenza A virus
attaccctaaggtatataaa

SEQ ID NO: 50335 - DNA, 20 bp, Influenza A virus
ccctaaggtatataaaactt

SEQ ID NO: 50336 - DNA, 20 bp, Influenza A virus
tttcgaaaaggtcgaaaggt

SEQ ID NO: 50337 - DNA, 20 bp, Influenza A virus
cgaaaaggtcgaaaggttga

SEQ ID NO: 50338 - DNA, 20 bp, Influenza A virus
gaaaaggtcgaaaggttgaa

SEQ ID NO: 50339 - DNA, 20 bp, Influenza A virus
taaaattgctcccttgatgg

SEQ ID NO: 50340 - DNA, 20 bp, Influenza A virus
ctcccttgatggtggcgtac

SEQ ID NO: 50341 - DNA, 20 bp, Influenza A virus
atggtggcgtacatgctaga

SEQ ID NO: 50342 - DNA, 20 bp, Influenza A virus
gtccgtaaaacaaggtttct

SEQ ID NO: 50343 - DNA, 20 bp, Influenza A virus
ttttacggaccaattctctt

SEQ ID NO: 50344 - DNA, 20 bp, Influenza A virus
gcatctctcttggaaatgtg

SEQ ID NO: 50345 - DNA, 20 bp, Influenza A virus
gaaatgtgccacagcacaca

SEQ ID NO: 50346 - DNA, 20 bp, Influenza A virus
ctcctccaatctgtgtgctg

SEQ ID NO: 50347 - DNA, 20 bp, Influenza A virus
ccaagagagatgctaatggg

SEQ ID NO: 50348 - DNA, 20 bp, Influenza A virus
caagagagatgctaatgggt

SEQ ID NO: 50349 - DNA, 20 bp, Influenza A virus
acaatggttgggagaagagc

SEQ ID NO: 50350 - DNA, 20 bp, Influenza A virus
ggagaagagcaacagctatt

SEQ ID NO: 50351 - DNA, 20 bp, Influenza A virus
tcagaaaggcaaccaggaga

SEQ ID NO: 50352 - DNA, 20 bp, Influenza A virus
cctttctgagaatagctgtt

SEQ ID NO: 50353 - DNA, 20 bp, Influenza A virus
ctgagaatagctgttgctct

SEQ ID NO: 50354 - DNA, 20 bp, Influenza A virus
acaataacttattcgtcatc

SEQ ID NO: 50355 - DNA, 20 bp, Influenza A virus
ttcgtcatcaatgatgtggg

SEQ ID NO: 50356 - DNA, 20 bp, Influenza A virus
gtcatcaatgatgtgggaga

SEQ ID NO: 50357 - DNA, 20 bp, Influenza A virus
tccattgataagtgttgact

SEQ ID NO: 50358 - DNA, 20 bp, Influenza A virus
ataagtgttgactagcactg

SEQ ID NO: 50359 - DNA, 20 bp, Influenza A virus
ggacatttgacactgtccaa

SEQ ID NO: 50360 - DNA, 20 bp, Influenza A virus
gacactgtccaaataataaa

SEQ ID NO: 50361 - DNA, 20 bp, Influenza A virus
acactgtccaaataataaaa

SEQ ID NO: 50362 - DNA, 20 bp, Influenza A virus
tcccctttgctgctgcccca

SEQ ID NO: 50363 - DNA, 20 bp, Influenza A virus
gctgctgccccaccagaaca

SEQ ID NO: 50364 - DNA, 20 bp, Influenza A virus
ctcattttgggcaaagaaga

SEQ ID NO: 50365 - DNA, 20 bp, Influenza A virus
tcattttgggcaaagaagac

SEQ ID NO: 50366 - DNA, 20 bp, Influenza A virus
tgggcaaagaagacaagaga

SEQ ID NO: 50367 - DNA, 20 bp, Influenza A virus
gggcaaagaagacaagagat

SEQ ID NO: 50368 - DNA, 20 bp, Influenza A virus
ggcaaagaagacaagagata

SEQ ID NO: 50369 - DNA, 20 bp, Human papillomavirus
ctgtgagcctcagtgtatta

SEQ ID NO: 50370 - DNA, 20 bp, Human papillomavirus
attctgatggaatccaaacc

SEQ ID NO: 50371 - DNA, 20 bp, Human papillomavirus
tgatggaatccaaaccaaga

SEQ ID NO: 50372 - DNA, 20 bp, Human papillomavirus
ggaggagtattgcaaacatt

SEQ ID NO: 50373 - DNA, 20 bp, Human papillomavirus
gaggagtattgcaaacatta

SEQ ID NO: 50374 - DNA, 20 bp, Human papillomavirus
tttagagttgacacgctttg

SEQ ID NO: 50375 - DNA, 20 bp, Human papillomavirus
agagttgacacgctttgcta

SEQ ID NO: 50376 - DNA, 20 bp, Human papillomavirus
gagttgacacgctttgctac

SEQ ID NO: 50377 - DNA, 20 bp, Human papillomavirus
acacgctttgctacttttgt

SEQ ID NO: 50378 - DNA, 20 bp, Human papillomavirus
gctacttttgtaaggttaga

SEQ ID NO: 50379 - DNA, 20 bp, Human papillomavirus
gagtccgaggctggaagctg

SEQ ID NO: 50380 - DNA, 20 bp, Human papillomavirus
agtccgaggctggaagctgt

SEQ ID NO: 50381 - DNA, 20 bp, Human papillomavirus
acatttctccacaaagagtg

SEQ ID NO: 50382 - DNA, 20 bp, Human papillomavirus
ctccacaaagagtgtcgaaa

SEQ ID NO: 50383 - DNA, 20 bp, Human papillomavirus
tccacaaagagtgtcgaaaa

SEQ ID NO: 50384 - DNA, 20 bp, Human papillomavirus
cccctccagaagacgaagaa

SEQ ID NO: 50385 - DNA, 20 bp, Human papillomavirus
tcagtggtgtcccatctcct

SEQ ID NO: 50386 - DNA, 20 bp, Human papillomavirus
aaagaaaaaatcttacacga

SEQ ID NO: 50387 - DNA, 20 bp, Human papillomavirus
cacgagttggaagattgcaa

SEQ ID NO: 50388 - DNA, 20 bp, Human papillomavirus
gaagattgcaagcagaagct

SEQ ID NO: 50389 - DNA, 20 bp, Human papillomavirus
ggttacagaccattaggtga

SEQ ID NO: 50390 - DNA, 20 bp, Human papillomavirus
cagaccattaggtgaagctg

SEQ ID NO: 50391 - DNA, 20 bp, Human papillomavirus
ggtgaagctggtggatcacg

SEQ ID NO: 50392 - DNA, 20 bp, Human papillomavirus
tggtagaccaataacatcaa

SEQ ID NO: 50393 - DNA, 20 bp, Human papillomavirus
caggagttgatgttattggt

SEQ ID NO: 50394 - DNA, 20 bp, Human papillomavirus
gggtggaagaattagaatta

SEQ ID NO: 50395 - DNA, 20 bp, Human papillomavirus
gaattatatacaatcactga

SEQ ID NO: 50396 - DNA, 20 bp, Human papillomavirus
tatacaatcactgactctac

SEQ ID NO: 50397 - DNA, 20 bp, Human papillomavirus
gttgtaacagtagtagattg

SEQ ID NO: 50398 - DNA, 20 bp, Human papillomavirus
taacagtagtagattgagtg

SEQ ID NO: 50399 - DNA, 20 bp, Human papillomavirus
gagcgggacttggcagaagt

SEQ ID NO: 50400 - DNA, 20 bp, Human papillomavirus
agcgggacttggcagaagta

SEQ ID NO: 50401 - DNA, 20 bp, Human papillomavirus
gcagaagtagcagcagcacc

SEQ ID NO: 50402 - DNA, 20 bp, Human papillomavirus
agagacgttactagattaca

SEQ ID NO: 50403 - DNA, 20 bp, Human papillomavirus
tctggtgctgctgctacttc

SEQ ID NO: 50404 - DNA, 20 bp, Human papillomavirus
acgacatactagctacaacg

SEQ ID NO: 50405 - DNA, 20 bp, Human papillomavirus
tacacaatgatgatatttta

SEQ ID NO: 50406 - DNA, 20 bp, Human papillomavirus
tgtataacatctgttgcatt

SEQ ID NO: 50407 - DNA, 20 bp, Human papillomavirus
catttatagggtctatcacc

SEQ ID NO: 50408 - DNA, 20 bp, Human papillomavirus
atagggtctatcaccgttgt

SEQ ID NO: 50409 - DNA, 20 bp, Human papillomavirus
aggaataggtactacaggcc

SEQ ID NO: 50410 - DNA, 20 bp, Human papillomavirus
ggaataggtactacaggcca

SEQ ID NO: 50411 - DNA, 20 bp, Human papillomavirus
ctttaacaaagtaggtgata

SEQ ID NO: 50412 - DNA, 20 bp, Human papillomavirus
aacaaagtaggtgatacaga

SEQ ID NO: 50413 - DNA, 20 bp, Human papillomavirus
acaaagtaggtgatacagag

SEQ ID NO: 50414 - DNA, 20 bp, Human papillomavirus
ggacatgctaattttagccg

SEQ ID NO: 50415 - DNA, 20 bp, Human papillomavirus
gacatgctaattttagccgt

SEQ ID NO: 50416 - DNA, 20 bp, Human papillomavirus
tagccgtttacaagaagata

SEQ ID NO: 50417 - DNA, 20 bp, Human papillomavirus
agccgtttacaagaagataa

SEQ ID NO: 50418 - DNA, 20 bp, Human papillomavirus
gccgtttacaagaagataaa

SEQ ID NO: 50419 - DNA, 20 bp, Human papillomavirus
tatttattactcatgggggt

SEQ ID NO: 50420 - DNA, 20 bp, Human papillomavirus
atttattactcatgggggtg

SEQ ID NO: 50421 - DNA, 20 bp, Human papillomavirus
tttattactcatgggggtgc

SEQ ID NO: 50422 - DNA, 20 bp, Human papillomavirus
attactcatgggggtgcatt

SEQ ID NO: 50423 - DNA, 20 bp, Human papillomavirus
ttactcatgggggtgcattc

SEQ ID NO: 50424 - DNA, 20 bp, Human papillomavirus type 103
tgagaagtcattgtgtatgt

SEQ ID NO: 50425 - DNA, 20 bp, Human papillomavirus type 103
tgtatgtatgtggtagccac

SEQ ID NO: 50426 - DNA, 20 bp, Human papillomavirus type 103
gaaactttgaacaacagctg

SEQ ID NO: 50427 - DNA, 20 bp, Human papillomavirus type 103
gaacaacagctgtgtggaaa

SEQ ID NO: 50428 - DNA, 20 bp, Human papillomavirus type 103
aacaacagctgtgtggaaac

SEQ ID NO: 50429 - DNA, 20 bp, Human papillomavirus type 103
actaattcagggacattgac

SEQ ID NO: 50430 - DNA, 20 bp, Human papillomavirus type 103
agggacattgactaatgggg

SEQ ID NO: 50431 - DNA, 20 bp, Human papillomavirus type 103
actaatggggatgaaaatgc

SEQ ID NO: 50432 - DNA, 20 bp, Human papillomavirus type 103
tacacagcagtaatagacaa

SEQ ID NO: 50433 - DNA, 20 bp, Human papillomavirus type 103
acacagcagtaatagacaag

SEQ ID NO: 50434 - DNA, 20 bp, Human papillomavirus type 103
gcaatgtgctaaacgtgcag

SEQ ID NO: 50435 - DNA, 20 bp, Human papillomavirus type 103
tttttttataaacaaagcat

SEQ ID NO: 50436 - DNA, 20 bp, Human papillomavirus type 103
ttttataaacaaagcatgtc

SEQ ID NO: 50437 - DNA, 20 bp, Human papillomavirus type 103
tttataaacaaagcatgtct

SEQ ID NO: 50438 - DNA, 20 bp, Human papillomavirus type 103
ttataaacaaagcatgtcta

SEQ ID NO: 50439 - DNA, 20 bp, Human papillomavirus type 103
gggcttatagacgatgctac

SEQ ID NO: 50440 - DNA, 20 bp, Human papillomavirus type 103
tagacgatgctacatttcca

SEQ ID NO: 50441 - DNA, 20 bp, Human papillomavirus type 103
ccatgtttccaatttatgga

SEQ ID NO: 50442 - DNA, 20 bp, Human papillomavirus type 103
catgtttccaatttatggat

SEQ ID NO: 50443 - DNA, 20 bp, Human papillomavirus type 103
ccaatttatggatgtgtata

SEQ ID NO: 50444 - DNA, 20 bp, Human papillomavirus type 103
taaggcaggagcatgtactg

SEQ ID NO: 50445 - DNA, 20 bp, Human papillomavirus type 103
ggcctacaaaaagtgccccc

SEQ ID NO: 50446 - DNA, 20 bp, Human papillomavirus type 103
gcagcatctgaaagcaaagc

SEQ ID NO: 50447 - DNA, 20 bp, Human papillomavirus type 103
tgatgcagttggtgctgaaa

SEQ ID NO: 50448 - DNA, 20 bp, Human papillomavirus type 103
tcagcaccaactgcatcata

SEQ ID NO: 50449 - DNA, 20 bp, Human papillomavirus type 103
atagacatggtaaagcaaaa

SEQ ID NO: 50450 - DNA, 20 bp, Human papillomavirus type 103
tagacatggtaaagcaaaaa

SEQ ID NO: 50451 - DNA, 20 bp, Human papillomavirus type 103
tgtgcattttaccaaggaag

SEQ ID NO: 50452 - DNA, 20 bp, Human papillomavirus type 103
taccaaggaagcagtaaaat

SEQ ID NO: 50453 - DNA, 20 bp, Human papillomavirus type 103
accaaggaagcagtaaaata

SEQ ID NO: 50454 - DNA, 20 bp, Human papillomavirus type 103
tttcagtgtattagcacagc

SEQ ID NO: 50455 - DNA, 20 bp, Human papillomavirus type 103
cagtgtattagcacagcttt

SEQ ID NO: 50456 - DNA, 20 bp, Human papillomavirus type 103
agtgtattagcacagctttt

SEQ ID NO: 50457 - DNA, 20 bp, Human papillomavirus type 103
gcacagcttttacatgggtg

SEQ ID NO: 50458 - DNA, 20 bp, Human papillomavirus type 103
tacatgggtggcggatgcgg

SEQ ID NO: 50459 - DNA, 20 bp, Human papillomavirus type 103
ccattgggtcggggtctgca

SEQ ID NO: 50460 - DNA, 20 bp, Human papillomavirus type 103
ggtcggggtctgcaggtggg

SEQ ID NO: 50461 - DNA, 20 bp, Human papillomavirus type 103
cccgacccccacctgcagac

SEQ ID NO: 50462 - DNA, 20 bp, Human papillomavirus type 103
cgccatcatacatctctgta

SEQ ID NO: 50463 - DNA, 20 bp, Human papillomavirus type 103
cacaatctgcagctgaggtg

SEQ ID NO: 50464 - DNA, 20 bp, Human papillomavirus type 103
tgtaacagggtctgtaggat

SEQ ID NO: 50465 - DNA, 20 bp, Human papillomavirus type 103
ggtcaacgtggcactattcg

SEQ ID NO: 50466 - DNA, 20 bp, Human papillomavirus type 103
gtacaagaagtggcctgcaa

SEQ ID NO: 50467 - DNA, 20 bp, Human papillomavirus type 103
ttattatgatttaagtagta

SEQ ID NO: 50468 - DNA, 20 bp, Human papillomavirus type 103
ttatgatttaagtagtatcc

SEQ ID NO: 50469 - DNA, 20 bp, Human papillomavirus type 103
tgatttaagtagtatccacc

SEQ ID NO: 50470 - DNA, 20 bp, Human papillomavirus type 103
gcatatgttttaatattttg

SEQ ID NO: 50471 - DNA, 20 bp, Human papillomavirus type 103
taatattttgcagatgtctt

SEQ ID NO: 50472 - DNA, 20 bp, Human papillomavirus type 103
aatattttgcagatgtcttt

SEQ ID NO: 50473 - DNA, 20 bp, Human papillomavirus type 103
atattttgcagatgtctttg

SEQ ID NO: 50474 - DNA, 20 bp, Human papillomavirus type 103
tgcagatgtctttgtggctg

SEQ ID NO: 50475 - DNA, 20 bp, Human papillomavirus type 103
gtagtaggctgtactccttg

SEQ ID NO: 50476 - DNA, 20 bp, Human papillomavirus type 103
tagtaggctgtactccttgt

SEQ ID NO: 50477 - DNA, 20 bp, Human papillomavirus type 103
tttgggggagcattgggatg

SEQ ID NO: 50478 - DNA, 20 bp, Human papillomavirus type 103
gggggagcattgggatgctg

SEQ ID NO: 50479 - DNA, 20 bp, Human papillomavirus type 103
ggggagcattgggatgctgc

SEQ ID NO: 50480 - DNA, 20 bp, Human papillomavirus type 103
tacaataaatgttaagtcag

SEQ ID NO: 50481 - DNA, 20 bp, Human papillomavirus type 103
acaataaatgttaagtcaga

SEQ ID NO: 50482 - DNA, 20 bp, Human papillomavirus type 103
caataaatgttaagtcagac

SEQ ID NO: 50483 - DNA, 20 bp, Human papillomavirus type 103
agtcagacgctggcgttgca

SEQ ID NO: 50484 - DNA, 20 bp, Human papillomavirus type 103
cacagcaatatgctgccacc

SEQ ID NO: 50485 - DNA, 20 bp, Human papillomavirus type 103
acagatatcctttgggtcgc

SEQ ID NO: 50486 - DNA, 20 bp, Human papillomavirus type 103
gggtcgcagatttttatctc

SEQ ID NO: 50487 - DNA, 20 bp, Human papillomavirus type 103
ggtcgcagatttttatctca

SEQ ID NO: 50488 - DNA, 20 bp, Human papillomavirus type 103
ttatctcaaactggggttag

SEQ ID NO: 50489 - DNA, 20 bp, Human papillomavirus type 103
tatctcaaactggggttagc

SEQ ID NO: 50490 - DNA, 20 bp, Human papillomavirus type 103
cagcaaccgaattagttatc

SEQ ID NO: 50491 - DNA, 20 bp, Human papillomavirus type 103
gttatctggccgttggccac

SEQ ID NO: 50492 - DNA, 20 bp, Human papillomavirus type 103
tctggccgttggccacgacc

SEQ ID NO: 50493 - DNA, 20 bp, Human papillomavirus type 103
gccacgaccggcagcgatgt

SEQ ID NO: 50494 - DNA, 20 bp, Human papillomavirus type 103
tgtaatattcttgatcctat

SEQ ID NO: 50495 - DNA, 20 bp, Human papillomavirus type 60
tcacccgatggtgatcctga

SEQ ID NO: 50496 - DNA, 20 bp, Human papillomavirus type 60
gcaacaggtgtctattgtat

SEQ ID NO: 50497 - DNA, 20 bp, Human papillomavirus type 60
caacaggtgtctattgtata

SEQ ID NO: 50498 - DNA, 20 bp, Human papillomavirus type 60
tatagggatagtgctcctcc

SEQ ID NO: 50499 - DNA, 20 bp, Human papillomavirus type 60
ttcgacatggcagatcctaa

SEQ ID NO: 50500 - DNA, 20 bp, Human papillomavirus type 60
tcgacatggcagatcctaat

SEQ ID NO: 50501 - DNA, 20 bp, Human papillomavirus type 60
cgacatggcagatcctaata

SEQ ID NO: 50502 - DNA, 20 bp, Human papillomavirus type 60
gacatggcagatcctaataa

SEQ ID NO: 50503 - DNA, 20 bp, Human papillomavirus type 60
attctcttgaattaaatgag

SEQ ID NO: 50504 - DNA, 20 bp, Human papillomavirus type 60
ctgacctaagtccaaggttg

SEQ ID NO: 50505 - DNA, 20 bp, Human papillomavirus type 60
gaagctgtcacaatttcacc

SEQ ID NO: 50506 - DNA, 20 bp, Human papillomavirus type 60
cacctcagagacaaagcaaa

SEQ ID NO: 50507 - DNA, 20 bp, Human papillomavirus type 60
acctcagagacaaagcaaaa

SEQ ID NO: 50508 - DNA, 20 bp, Human papillomavirus type 60
tgctttgtctctgaggtgaa

SEQ ID NO: 50509 - DNA, 20 bp, Human papillomavirus type 60
aacgcgaccgtttaaaagtg

SEQ ID NO: 50510 - DNA, 20 bp, Human papillomavirus type 60
acgcgaccgtttaaaagtga

SEQ ID NO: 50511 - DNA, 20 bp, Human papillomavirus type 60
aaaagtgatagatcatgttg

SEQ ID NO: 50512 - DNA, 20 bp, Human papillomavirus type 60
aaagtgatagatcatgttgt

SEQ ID NO: 50513 - DNA, 20 bp, Human papillomavirus type 60
tgaaaactgggttataagtg

SEQ ID NO: 50514 - DNA, 20 bp, Human papillomavirus type 60
gatagtgatgcacaaacata

SEQ ID NO: 50515 - DNA, 20 bp, Human papillomavirus type 60
atagtgatgcacaaacatat

SEQ ID NO: 50516 - DNA, 20 bp, Human papillomavirus type 60
acaaactgggacatggacag

SEQ ID NO: 50517 - DNA, 20 bp, Human papillomavirus type 60
taaaaaccaaattatttctg

SEQ ID NO: 50518 - DNA, 20 bp, Human papillomavirus type 60
tttctgctcctgttaccagc

SEQ ID NO: 50519 - DNA, 20 bp, Human papillomavirus type 60
gattacgacgccgaagatcc

SEQ ID NO: 50520 - DNA, 20 bp, Human papillomavirus type 60
cgacgccgaagatccaacga

SEQ ID NO: 50521 - DNA, 20 bp, Human papillomavirus type 60
gtcgggtactctgcgtcttt

SEQ ID NO: 50522 - DNA, 20 bp, Human papillomavirus type 60
tggtacggggcgactctctg

SEQ ID NO: 50523 - DNA, 20 bp, Human papillomavirus type 60
ggtacggggcgactctctgg

SEQ ID NO: 50524 - DNA, 20 bp, Human papillomavirus type 60
atactcaaccaacagtatat

SEQ ID NO: 50525 - DNA, 20 bp, Human papillomavirus type 60
ataatacagttgctacatta

SEQ ID NO: 50526 - DNA, 20 bp, Human papillomavirus type 60
ctacattagacattacacca

SEQ ID NO: 50527 - DNA, 20 bp, Human papillomavirus type 60
gacattacaccagctacacc

SEQ ID NO: 50528 - DNA, 20 bp, Human papillomavirus type 60
caccagctacaccaccagtg

SEQ ID NO: 50529 - DNA, 20 bp, Human papillomavirus type 60
gaaatagaagaacctccacg

SEQ ID NO: 50530 - DNA, 20 bp, Human papillomavirus type 60
aaatagaagaacctccacgt

SEQ ID NO: 50531 - DNA, 20 bp, Human papillomavirus type 60
caacgtgttacaacacgggc

SEQ ID NO: 50532 - DNA, 20 bp, Human papillomavirus type 60
aacgtgttacaacacgggca

SEQ ID NO: 50533 - DNA, 20 bp, Human papillomavirus type 60
caacacgggcaagggaatta

SEQ ID NO: 50534 - DNA, 20 bp, Human papillomavirus type 60
cagatgtcagggaattagga

SEQ ID NO: 50535 - DNA, 20 bp, Human papillomavirus type 60
ggacgagctcggttttcaga

SEQ ID NO: 50536 - DNA, 20 bp, Human papillomavirus type 60
tcagaaacatctgcaggaac

SEQ ID NO: 50537 - DNA, 20 bp, Human papillomavirus type 60
cagaaacatctgcaggaaca

SEQ ID NO: 50538 - DNA, 20 bp, Human papillomavirus type 60
agaaacatctgcaggaacaa

SEQ ID NO: 50539 - DNA, 20 bp, Human papillomavirus type 60
acagaaaactttaataatgc

SEQ ID NO: 50540 - DNA, 20 bp, Human papillomavirus type 60
cagaaaactttaataatgca

SEQ ID NO: 50541 - DNA, 20 bp, Human papillomavirus type 60
aataatgcacagctgatatt

SEQ ID NO: 50542 - DNA, 20 bp, Human papillomavirus type 60
ataatgcacagctgatattt

SEQ ID NO: 50543 - DNA, 20 bp, Human papillomavirus type 60
gcaacaatagatgaaggaga

SEQ ID NO: 50544 - DNA, 20 bp, Human papillomavirus type 60
tatttacatcctcatcttct

SEQ ID NO: 50545 - DNA, 20 bp, Human papillomavirus type 60
atttacatcctcatcttctt

SEQ ID NO: 50546 - DNA, 20 bp, Human papillomavirus type 60
tttacatcctcatcttctta

SEQ ID NO: 50547 - DNA, 20 bp, Human papillomavirus type 60
acatcctcatcttcttaggc

SEQ ID NO: 50548 - DNA, 20 bp, Human papillomavirus type 60
catcctcatcttcttaggcg

SEQ ID NO: 50549 - DNA, 20 bp, Human papillomavirus type 60
tgcgactactatttccagat

SEQ ID NO: 50550 - DNA, 20 bp, Human papillomavirus type 60
ccagatccaaacaaatttgc

SEQ ID NO: 50551 - DNA, 20 bp, Human papillomavirus type 60
cagatccaaacaaatttgca

SEQ ID NO: 50552 - DNA, 20 bp, Human papillomavirus type 60
gcaatgatagacagagctgt

SEQ ID NO: 50553 - DNA, 20 bp, Human papillomavirus type 60
caatgatagacagagctgtc

SEQ ID NO: 50554 - DNA, 20 bp, Human papillomavirus type 60
caatggatccaaaacaaatg

SEQ ID NO: 50555 - DNA, 20 bp, Human papillomavirus type 60
aatggatccaaaacaaatgc

SEQ ID NO: 50556 - DNA, 20 bp, Human papillomavirus type 60
tttattgtaggatgtaaacc

SEQ ID NO: 50557 - DNA, 20 bp, Human papillomavirus type 60
attgtaggatgtaaaccagc

SEQ ID NO: 50558 - DNA, 20 bp, Human papillomavirus type 60
ttgtaggatgtaaaccagcc

SEQ ID NO: 50559 - DNA, 20 bp, Human papillomavirus type 60
ataattatcttggcattgca

SEQ ID NO: 50560 - DNA, 20 bp, Human papillomavirus type 60
tcttggcattgcatatcgag

SEQ ID NO: 50561 - DNA, 20 bp, Human papillomavirus type 60
gcattgcatatcgagactat

SEQ ID NO: 50562 - DNA, 20 bp, Human papillomavirus type 60
catatcgagactataagaaa

SEQ ID NO: 50563 - DNA, 20 bp, Human papillomavirus type 60
gcacactctcggatttaaca

SEQ ID NO: 50564 - DNA, 20 bp, Human herpesvirus 4
ctgcgactcctgggcgccac

SEQ ID NO: 50565 - DNA, 20 bp, Human herpesvirus 4
gcgtggagatgggcaggcag

SEQ ID NO: 50566 - DNA, 20 bp, Human herpesvirus 4
ggcttcgaggtgcatagaag

SEQ ID NO: 50567 - DNA, 20 bp, Human herpesvirus 4
gcttcgaggtgcatagaagc

SEQ ID NO: 50568 - DNA, 20 bp, Human herpesvirus 4
gaggtgcatagaagccggcc

SEQ ID NO: 50569 - DNA, 20 bp, Human herpesvirus 4
gaggtgcagcacggcccaga

SEQ ID NO: 50570 - DNA, 20 bp, Human herpesvirus 4
aggtgcagcacggcccagag

SEQ ID NO: 50571 - DNA, 20 bp, Human herpesvirus 4
cgccagtcgctgcgcctgct

SEQ ID NO: 50572 - DNA, 20 bp, Human herpesvirus 4
ccagcagcaggcgcagcgac

SEQ ID NO: 50573 - DNA, 20 bp, Human herpesvirus 4
gatctggaccttgctcgccc

SEQ ID NO: 50574 - DNA, 20 bp, Human herpesvirus 4
ccaatcaattctgtgacggg

SEQ ID NO: 50575 - DNA, 20 bp, Human herpesvirus 4
tgtgacggggtttcctggac

SEQ ID NO: 50576 - DNA, 20 bp, Human herpesvirus 4
cctggacacccagtcttagt

SEQ ID NO: 50577 - DNA, 20 bp, Human herpesvirus 4
ctggacacccagtcttagtt

SEQ ID NO: 50578 - DNA, 20 bp, Human herpesvirus 4
gttcaggtagacacccagtt

SEQ ID NO: 50579 - DNA, 20 bp, Human herpesvirus 4
ggcctggctccccatagact

SEQ ID NO: 50580 - DNA, 20 bp, Human herpesvirus 4
tgcccccctggcggcccagc

SEQ ID NO: 50581 - DNA, 20 bp, Human herpesvirus 4
gcccccctggcggcccagcc

SEQ ID NO: 50582 - DNA, 20 bp, Human herpesvirus 4
cccccctggcggcccagccc

SEQ ID NO: 50583 - DNA, 20 bp, Human herpesvirus 4
catgggagtctatggggagc

SEQ ID NO: 50584 - DNA, 20 bp, Human herpesvirus 4
gcagaaaaaattaaagtcca

SEQ ID NO: 50585 - DNA, 20 bp, Human herpesvirus 4
aagtccacttacctctggcc

SEQ ID NO: 50586 - DNA, 20 bp, Human herpesvirus 4
cctctggcccgataccgggg

SEQ ID NO: 50587 - DNA, 20 bp, Human herpesvirus 4
acttcggtctcccctaggct

SEQ ID NO: 50588 - DNA, 20 bp, Human herpesvirus 4
ggtctcccctaggcttggat

SEQ ID NO: 50589 - DNA, 20 bp, Human herpesvirus 4
ctaactttttccccttccct

SEQ ID NO: 50590 - DNA, 20 bp, Human herpesvirus 4
taactttttccccttccctc

SEQ ID NO: 50591 - DNA, 20 bp, Human herpesvirus 4
ttccccttccctccctcgtc

SEQ ID NO: 50592 - DNA, 20 bp, Human herpesvirus 4
tccccttccctccctcgtct

SEQ ID NO: 50593 - DNA, 20 bp, Human herpesvirus 4
ccccttccctccctcgtctt

SEQ ID NO: 50594 - DNA, 20 bp, Human herpesvirus 4
tcccgtggacaatgtccctc

SEQ ID NO: 50595 - DNA, 20 bp, Human herpesvirus 4
gggatgcatcactttgagcc

SEQ ID NO: 50596 - DNA, 20 bp, Human herpesvirus 4
ggatgcatcactttgagcca

SEQ ID NO: 50597 - DNA, 20 bp, Human herpesvirus 4
gagccactaagcccccgttg

SEQ ID NO: 50598 - DNA, 20 bp, Human herpesvirus 4
agccactaagcccccgttgc

SEQ ID NO: 50599 - DNA, 20 bp, Human herpesvirus 4
taagagttaaaagcaactac

SEQ ID NO: 50600 - DNA, 20 bp, Human herpesvirus 4
aagagttaaaagcaactact

SEQ ID NO: 50601 - DNA, 20 bp, Human herpesvirus 4
agagttaaaagcaactactg

SEQ ID NO: 50602 - DNA, 20 bp, Human herpesvirus 4
aaagcaactactgtttattt

SEQ ID NO: 50603 - DNA, 20 bp, Human herpesvirus 4
attttccaaaatgagctggg

SEQ ID NO: 50604 - DNA, 20 bp, Human herpesvirus 4
gaggccgtgtagtttctgtg

SEQ ID NO: 50605 - DNA, 20 bp, Human herpesvirus 4
aggccgtgtagtttctgtgg

SEQ ID NO: 50606 - DNA, 20 bp, Human herpesvirus 4
ctgtggtgcggatgcattag

SEQ ID NO: 50607 - DNA, 20 bp, Human herpesvirus 4
tgtggtgcggatgcattagg

SEQ ID NO: 50608 - DNA, 20 bp, Human herpesvirus 4
ggcggcgcaatgcgggatct

SEQ ID NO: 50609 - DNA, 20 bp, Human herpesvirus 4
cttcttccacggcgccgcct

SEQ ID NO: 50610 - DNA, 20 bp, Human herpesvirus 4
ttccacggcgccgcctcgga

SEQ ID NO: 50611 - DNA, 20 bp, Human herpesvirus 4
cacggcgccgcctcggattc

SEQ ID NO: 50612 - DNA, 20 bp, Human herpesvirus 4
cgaccacgagtctttgtccc

SEQ ID NO: 50613 - DNA, 20 bp, Human herpesvirus 4
tcccgctgggcccagtctca

SEQ ID NO: 50614 - DNA, 20 bp, Human herpesvirus 4
gcgacagagttacaccagcg

SEQ ID NO: 50615 - DNA, 20 bp, Human herpesvirus 4
caccagcgactgcaccttcg

SEQ ID NO: 50616 - DNA, 20 bp, Human herpesvirus 4
tctcgtgtctgctgaacgtg

SEQ ID NO: 50617 - DNA, 20 bp, Human herpesvirus 4
cagatcccacgcctccagac

SEQ ID NO: 50618 - DNA, 20 bp, Human herpesvirus 4
agatcccacgcctccagacc

SEQ ID NO: 50619 - DNA, 20 bp, Human herpesvirus 4
taggcccggggacccgcggc

SEQ ID NO: 50620 - DNA, 20 bp, Human herpesvirus 4
aagacgctgctgatggtgtg

SEQ ID NO: 50621 - DNA, 20 bp, Human herpesvirus 4
aacgacttttgggctccagc

SEQ ID NO: 50622 - DNA, 20 bp, Human herpesvirus 4
acgacttttgggctccagcc

SEQ ID NO: 50623 - DNA, 20 bp, Human herpesvirus 4
tgggctccagccccaggaca

SEQ ID NO: 50624 - DNA, 20 bp, Human herpesvirus 4
gggctccagccccaggacac

SEQ ID NO: 50625 - DNA, 20 bp, Human herpesvirus 4
ccatcaatcgggggcctggg

SEQ ID NO: 50626 - DNA, 20 bp, Human herpesvirus 4
ccccgggattggccgccccc

SEQ ID NO: 50627 - DNA, 20 bp, Human herpesvirus 4
gccgcccccatcactctccc

SEQ ID NO: 50628 - DNA, 20 bp, Human herpesvirus 4
atggcaaggccctatttcgg

SEQ ID NO: 50629 - DNA, 20 bp, Human herpesvirus 4
ctgggcgccccatcgttcta

SEQ ID NO: 50630 - DNA, 20 bp, Human herpesvirus 4
tacgcaggactcggcctggt

SEQ ID NO: 50631 - DNA, 20 bp, Human herpesvirus 4
agggggtcgcagggagactc

SEQ ID NO: 50632 - DNA, 20 bp, Human herpesvirus 4
ccagccagagggtgccggcg

SEQ ID NO: 50633 - DNA, 20 bp, Human herpesvirus 4
cagccagagggtgccggcgt

SEQ ID NO: 50634 - DNA, 20 bp, Human herpesvirus 4
acccggcctacgtctccgca

SEQ ID NO: 50635 - DNA, 20 bp, Human herpesvirus 4
ccgccatctcgtgggccttc

SEQ ID NO: 50636 - DNA, 20 bp, Human herpesvirus 4
gccatcagggtctggctctc

SEQ ID NO: 50637 - DNA, 20 bp, Human herpesvirus 4
cacacggctctggaggccgt

SEQ ID NO: 50638 - DNA, 20 bp, Human herpesvirus 4
acacggctctggaggccgtc

SEQ ID NO: 50639 - DNA, 20 bp, Human herpesvirus 4
ctaattctggcccaggcctc

SEQ ID NO: 50640 - DNA, 20 bp, Human herpesvirus 4
tggcccaggcctcattcgcc

SEQ ID NO: 50641 - DNA, 20 bp, Human herpesvirus 4
gcctctcgcgctcgccgctc

SEQ ID NO: 50642 - DNA, 20 bp, Human herpesvirus 4
ggaaggcgctgggggcacgc

SEQ ID NO: 50643 - DNA, 20 bp, Human herpesvirus 4
gtggccagggacggcaggca

SEQ ID NO: 50644 - DNA, 20 bp, Human herpesvirus 4
gcggccaggtgctcatggaa

SEQ ID NO: 50645 - DNA, 20 bp, Human herpesvirus 4
cggccaggtgctcatggaac

SEQ ID NO: 50646 - DNA, 20 bp, Human herpesvirus 4
catgagcacctggccgcaaa

SEQ ID NO: 50647 - DNA, 20 bp, Human herpesvirus 4
cagtgggcctggttgcacga

SEQ ID NO: 50648 - DNA, 20 bp, Human herpesvirus 4
cacgaggccgtgcctaggat

SEQ ID NO: 50649 - DNA, 20 bp, Human herpesvirus 4
ggccgctttgccggcatcca

SEQ ID NO: 50650 - DNA, 20 bp, Human herpesvirus 4
gccgctttgccggcatccag

SEQ ID NO: 50651 - DNA, 20 bp, Human herpesvirus 4
gggccggcacgaggtggtgg

SEQ ID NO: 50652 - DNA, 20 bp, Human herpesvirus 4
tcgccgcctttgctcgcacg

SEQ ID NO: 50653 - DNA, 20 bp, Human herpesvirus 4
gctcgcacggcccgggtcca

SEQ ID NO: 50654 - DNA, 20 bp, Human herpesvirus 4
ctcgcacggcccgggtccag

SEQ ID NO: 50655 - DNA, 20 bp, Human herpesvirus 4
tccttcaccgctaccaccgc

SEQ ID NO: 50656 - DNA, 20 bp, Human herpesvirus 4
ccttcaccgctaccaccgcc

SEQ ID NO: 50657 - DNA, 20 bp, Human herpesvirus 4
cttcaccgctaccaccgcct

SEQ ID NO: 50658 - DNA, 20 bp, Human herpesvirus 4
accgctaccaccgcctcctc

SEQ ID NO: 50659 - DNA, 20 bp, Human herpesvirus 4
cgtcgccagagggatctgca

SEQ ID NO: 50660 - DNA, 20 bp, Human herpesvirus 4
atccttttgaaggaggcctg

SEQ ID NO: 50661 - DNA, 20 bp, Human herpesvirus 4
tgaaggaggcctgcaacgcc

SEQ ID NO: 50662 - DNA, 20 bp, Human herpesvirus 4
gaaggaggcctgcaacgccc

SEQ ID NO: 50663 - DNA, 20 bp, Human herpesvirus 4
aaggaggcctgcaacgccca

SEQ ID NO: 50664 - DNA, 20 bp, Human herpesvirus 4
tggcgcgacctgcagggcga

SEQ ID NO: 50665 - DNA, 20 bp, Human herpesvirus 4
atccccctgcgtgtcggccc

SEQ ID NO: 50666 - DNA, 20 bp, Human herpesvirus 4
cggggccggttgacatcatg

SEQ ID NO: 50667 - DNA, 20 bp, Human herpesvirus 4
acatcatgagcaagggccca

SEQ ID NO: 50668 - DNA, 20 bp, Human herpesvirus 4
ctcatgatgtcaaccggccc

SEQ ID NO: 50669 - DNA, 20 bp, Human herpesvirus 4
catgggacgaggcggcatct

SEQ ID NO: 50670 - DNA, 20 bp, Human herpesvirus 4
tctgctcggtagcagcggac

SEQ ID NO: 50671 - DNA, 20 bp, Human herpesvirus 4
gcctctgccgcattccggcc

SEQ ID NO: 50672 - DNA, 20 bp, Human herpesvirus 4
cggccgttagcgtgccaatc

SEQ ID NO: 50673 - DNA, 20 bp, Human herpesvirus 4
gcgtgccaatcttgaggttt

SEQ ID NO: 50674 - DNA, 20 bp, Human herpesvirus 4
gcacgctaacggccggaatg

SEQ ID NO: 50675 - DNA, 20 bp, Human herpesvirus 4
ccagccactccagcaacacc

SEQ ID NO: 50676 - DNA, 20 bp, Human herpesvirus 4
agctcgcgaggaaaaggaca

SEQ ID NO: 50677 - DNA, 20 bp, Human herpesvirus 4
tcctcgcgagctgaacagcc

SEQ ID NO: 50678 - DNA, 20 bp, Human herpesvirus 4
cctcgcgagctgaacagcca

SEQ ID NO: 50679 - DNA, 20 bp, Human herpesvirus 4
ctcgcgagctgaacagccag

SEQ ID NO: 50680 - DNA, 20 bp, Human herpesvirus 4
gtcggggtggagacgacctc

SEQ ID NO: 50681 - DNA, 20 bp, Human herpesvirus 4
caaagtagtgcctgtctgca

SEQ ID NO: 50682 - DNA, 20 bp, Human herpesvirus 4
tgcagacaggcactactttg

SEQ ID NO: 50683 - DNA, 20 bp, Human herpesvirus 4
gcagacaggcactactttgt

SEQ ID NO: 50684 - DNA, 20 bp, Human herpesvirus 4
cagacaggcactactttgta

SEQ ID NO: 50685 - DNA, 20 bp, Human herpesvirus 4
acttccgagtctggtcagag

SEQ ID NO: 50686 - DNA, 20 bp, Human herpesvirus 4
cttccgagtctggtcagagc

SEQ ID NO: 50687 - DNA, 20 bp, Human herpesvirus 4
cgagtctggtcagagcctgg

SEQ ID NO: 50688 - DNA, 20 bp, Human herpesvirus 4
ggctcctcggcatgggcgga

SEQ ID NO: 50689 - DNA, 20 bp, Human herpesvirus 4
gctcctcggcatgggcggag

SEQ ID NO: 50690 - DNA, 20 bp, Human herpesvirus 4
acgcggtagatgcggcgcag

SEQ ID NO: 50691 - DNA, 20 bp, Human herpesvirus 4
ggacgcagccacgccacgcg

SEQ ID NO: 50692 - DNA, 20 bp, Human herpesvirus 4
acatctcggccaggtggttc

SEQ ID NO: 50693 - DNA, 20 bp, Human herpesvirus 4
tggcacaaacaaaacaggcg

SEQ ID NO: 50694 - DNA, 20 bp, Human herpesvirus 4
cggaggccatcctcgatgcc

SEQ ID NO: 50695 - DNA, 20 bp, Human herpesvirus 4
cgcctgttttgtttgtgcca

SEQ ID NO: 50696 - DNA, 20 bp, Human herpesvirus 4
tgtttgtgccacaacgcctc

SEQ ID NO: 50697 - DNA, 20 bp, Human herpesvirus 4
gtttgtgccacaacgcctcg

SEQ ID NO: 50698 - DNA, 20 bp, Human herpesvirus 4
catcaactccgcctttgagc

SEQ ID NO: 50699 - DNA, 20 bp, Human herpesvirus 4
atcaactccgcctttgagcc

SEQ ID NO: 50700 - DNA, 20 bp, Human herpesvirus 4
gagcccgaggtgcccacccc

SEQ ID NO: 50701 - DNA, 20 bp, Human herpesvirus 4
agcccgaggtgcccaccccc

SEQ ID NO: 50702 - DNA, 20 bp, Human herpesvirus 4
caccgcctcccgtggtgcgg

SEQ ID NO: 50703 - DNA, 20 bp, Human herpesvirus 4
tgagctccgatggacgcagc

SEQ ID NO: 50704 - DNA, 20 bp, Human herpesvirus 4
gagctccgatggacgcagcg

SEQ ID NO: 50705 - DNA, 20 bp, Human herpesvirus 4
agctccgatggacgcagcgt

SEQ ID NO: 50706 - DNA, 20 bp, Human herpesvirus 4
tagcgccgctgattctggag

SEQ ID NO: 50707 - DNA, 20 bp, Human herpesvirus 4
tggaggattagccggagttc

SEQ ID NO: 50708 - DNA, 20 bp, Human herpesvirus 4
cttctgctccagtgcctccg

SEQ ID NO: 50709 - DNA, 20 bp, Human herpesvirus 4
tgctccagtgcctccgcctg

SEQ ID NO: 50710 - DNA, 20 bp, Human herpesvirus 4
cttcagagccttattctcag

SEQ ID NO: 50711 - DNA, 20 bp, Human herpesvirus 4
agagccttattctcagactc

SEQ ID NO: 50712 - DNA, 20 bp, Human herpesvirus 4
ctttctgtgccgttgtcccg

SEQ ID NO: 50713 - DNA, 20 bp, Human herpesvirus 4
ctgtgccgttgtcccgtgga

SEQ ID NO: 50714 - DNA, 20 bp, Human herpesvirus 4
tgtgccgttgtcccgtggag

SEQ ID NO: 50715 - DNA, 20 bp, Human herpesvirus 4
tcccgtggagatggacttgg

SEQ ID NO: 50716 - DNA, 20 bp, Human herpesvirus 4
gtgtcaccggtgatgcgcct

SEQ ID NO: 50717 - DNA, 20 bp, Human herpesvirus 4
attccttgagcaaaacctga

SEQ ID NO: 50718 - DNA, 20 bp, Human herpesvirus 4
ttccttgagcaaaacctgaa

SEQ ID NO: 50719 - DNA, 20 bp, Human herpesvirus 4
cttgagcaaaacctgaacat

SEQ ID NO: 50720 - DNA, 20 bp, Human herpesvirus 4
agcaaaacctgaacatcgaa

SEQ ID NO: 50721 - DNA, 20 bp, Human herpesvirus 4
atatggatgtgcatgacagt

SEQ ID NO: 50722 - DNA, 20 bp, Human herpesvirus 4
gacgtggacccttggttgta

SEQ ID NO: 50723 - DNA, 20 bp, Human herpesvirus 4
gttgtagagggaggtgttgg

SEQ ID NO: 50724 - DNA, 20 bp, Human herpesvirus 4
tagagggaggtgttggttgg

SEQ ID NO: 50725 - DNA, 20 bp, Human herpesvirus 4
gttggcgacattggcttctg

SEQ ID NO: 50726 - DNA, 20 bp, Human herpesvirus 4
gcgacattggcttctgacat

SEQ ID NO: 50727 - DNA, 20 bp, Human herpesvirus 4
cgagttcatctgtaaaagca

SEQ ID NO: 50728 - DNA, 20 bp, Human herpesvirus 4
gagttcatctgtaaaagcat

SEQ ID NO: 50729 - DNA, 20 bp, Human herpesvirus 4
atctgtaaaagcatgaaact

SEQ ID NO: 50730 - DNA, 20 bp, Human herpesvirus 4
catgcttttacagatgaact

SEQ ID NO: 50731 - DNA, 20 bp, Human herpesvirus 4
atgcttttacagatgaactc

SEQ ID NO: 50732 - DNA, 20 bp, Human herpesvirus 4
tgcgtggccgtcatggaggg

SEQ ID NO: 50733 - DNA, 20 bp, Human herpesvirus 4
ccttcctcatacctatggag

SEQ ID NO: 50734 - DNA, 20 bp, Human herpesvirus 4
ctcatacctatggagatgcc

SEQ ID NO: 50735 - DNA, 20 bp, Human herpesvirus 4
gcagccaatgcaacttggac

SEQ ID NO: 50736 - DNA, 20 bp, Human herpesvirus 4
cagccaatgcaacttggacg

SEQ ID NO: 50737 - DNA, 20 bp, Human herpesvirus 4
gacgtttttggggtctccgg

SEQ ID NO: 50738 - DNA, 20 bp, Human herpesvirus 4
ttggggtctccggacaccat

SEQ ID NO: 50739 - DNA, 20 bp, Human herpesvirus 4
tggggtctccggacaccatc

SEQ ID NO: 50740 - DNA, 20 bp, Human herpesvirus 4
cacgacttccccccctggct

SEQ ID NO: 50741 - DNA, 20 bp, Human herpesvirus 4
acgacttccccccctggctc

SEQ ID NO: 50742 - DNA, 20 bp, Human herpesvirus 4
cccccctggctctttcacgt

SEQ ID NO: 50743 - DNA, 20 bp, Human herpesvirus 4
cacgtcctctaccccggcgg

SEQ ID NO: 50744 - DNA, 20 bp, Human herpesvirus 4
acgtcctctaccccggcggc

SEQ ID NO: 50745 - DNA, 20 bp, Human herpesvirus 4
ttagtattgtgttccaggca

SEQ ID NO: 50746 - DNA, 20 bp, Human herpesvirus 4
gtattgtgttccaggcagca

SEQ ID NO: 50747 - DNA, 20 bp, Human herpesvirus 4
tgttccaggcagcacacgaa

SEQ ID NO: 50748 - DNA, 20 bp, Human herpesvirus 4
caggcagcacacgaagcctg

SEQ ID NO: 50749 - DNA, 20 bp, Human herpesvirus 4
accattagcctgggcatgcg

SEQ ID NO: 50750 - DNA, 20 bp, Human herpesvirus 4
gttcgcctgaactcggcggc

SEQ ID NO: 50751 - DNA, 20 bp, Human herpesvirus 4
gcctgaactcggcggcaatg

SEQ ID NO: 50752 - DNA, 20 bp, Human herpesvirus 4
ccgccgagttcaggcgaacc

SEQ ID NO: 50753 - DNA, 20 bp, Human herpesvirus 4
aggcgaaccaagcccagggg

SEQ ID NO: 50754 - DNA, 20 bp, Human herpesvirus 4
gaggtcctgagagacatgca

SEQ ID NO: 50755 - DNA, 20 bp, Human herpesvirus 4
atgtggcggctcttgaaccc

SEQ ID NO: 50756 - DNA, 20 bp, Human herpesvirus 4
tgtggcggctcttgaaccca

SEQ ID NO: 50757 - DNA, 20 bp, Human herpesvirus 4
aacccaaaggcgctatagac

SEQ ID NO: 50758 - DNA, 20 bp, Human herpesvirus 4
ggcagtaggctcggagtgtc

SEQ ID NO: 50759 - DNA, 20 bp, Human herpesvirus 4
gggttcaagagccgccacat

SEQ ID NO: 50760 - DNA, 20 bp, Human herpesvirus 4
accgccataacgccatctgc

SEQ ID NO: 50761 - DNA, 20 bp, Human herpesvirus 4
tggcggttaacttccagcac

SEQ ID NO: 50762 - DNA, 20 bp, Human herpesvirus 4
acttccagcaccaggcgggg

SEQ ID NO: 50763 - DNA, 20 bp, Human herpesvirus 4
cagcaccaggcggggggtca

SEQ ID NO: 50764 - DNA, 20 bp, Human herpesvirus 4
ctttttgcatggtcaggctc

SEQ ID NO: 50765 - DNA, 20 bp, Human herpesvirus 4
gggtgaaggctcgacgcggg

SEQ ID NO: 50766 - DNA, 20 bp, Human herpesvirus 4
cagggggatctttacgtggg

SEQ ID NO: 50767 - DNA, 20 bp, Human herpesvirus 4
agggggatctttacgtgggt

SEQ ID NO: 50768 - DNA, 20 bp, Human herpesvirus 4
acgtgggtggatgtagggag

SEQ ID NO: 50769 - DNA, 20 bp, Human herpesvirus 4
cgtgggtggatgtagggagc

SEQ ID NO: 50770 - DNA, 20 bp, Human herpesvirus 4
gtgccacaaagcccaggatg

SEQ ID NO: 50771 - DNA, 20 bp, Human herpesvirus 4
tcctacacgcggccgctgac

SEQ ID NO: 50772 - DNA, 20 bp, Human herpesvirus 4
tgcagacgagttcatcctgg

SEQ ID NO: 50773 - DNA, 20 bp, Human herpesvirus 4
atcctgggctttgtggcacc

SEQ ID NO: 50774 - DNA, 20 bp, Human herpesvirus 4
ttggtcccgcccatcatccc

SEQ ID NO: 50775 - DNA, 20 bp, Human herpesvirus 4
gtcccgcccatcatcccccg

SEQ ID NO: 50776 - DNA, 20 bp, Human herpesvirus 4
ggcagaccacctgtgctgga

SEQ ID NO: 50777 - DNA, 20 bp, Human herpesvirus 4
gcagaccacctgtgctggaa

SEQ ID NO: 50778 - DNA, 20 bp, Human herpesvirus 4
cagcctctctttccagcaca

SEQ ID NO: 50779 - DNA, 20 bp, Human herpesvirus 4
ccccgtgctgcagcgtaaac

SEQ ID NO: 50780 - DNA, 20 bp, Human herpesvirus 4
gcagtgggacctggggccgt

SEQ ID NO: 50781 - DNA, 20 bp, Human herpesvirus 4
gatgtgggccctcttctacg

SEQ ID NO: 50782 - DNA, 20 bp, Human herpesvirus 4
tacggccccaggtcccactg

SEQ ID NO: 50783 - DNA, 20 bp, Human herpesvirus 4
acgctgcagcacggggcaag

SEQ ID NO: 50784 - DNA, 20 bp, Human herpesvirus 4
accgcgttgaacatgctgta

SEQ ID NO: 50785 - DNA, 20 bp, Human herpesvirus 4
aacatgctgtatgcctcgca

SEQ ID NO: 50786 - DNA, 20 bp, Human herpesvirus 4
cttaggttctcggtcagacg

SEQ ID NO: 50787 - DNA, 20 bp, Human herpesvirus 4
ttaggttctcggtcagacgg

SEQ ID NO: 50788 - DNA, 20 bp, Human herpesvirus 4
ggttctcggtcagacggccg

SEQ ID NO: 50789 - DNA, 20 bp, Human herpesvirus 4
caagggctactagctgggaa

SEQ ID NO: 50790 - DNA, 20 bp, Human herpesvirus 4
ccccaggccgaggccccttc

SEQ ID NO: 50791 - DNA, 20 bp, Human herpesvirus 4
gggctgcttcccagctagta

SEQ ID NO: 50792 - DNA, 20 bp, Human herpesvirus 4
ccagctagtagcccttggaa

SEQ ID NO: 50793 - DNA, 20 bp, Human herpesvirus 4
ggcacgcgattggggcaaag

SEQ ID NO: 50794 - DNA, 20 bp, Human herpesvirus 4
gcacgcgattggggcaaagc

SEQ ID NO: 50795 - DNA, 20 bp, Human herpesvirus 4
gggcaaagctctgccataac

SEQ ID NO: 50796 - DNA, 20 bp, Human herpesvirus 4
gttcccgacacggttatggc

SEQ ID NO: 50797 - DNA, 20 bp, Human herpesvirus 4
ttcccgacacggttatggca

SEQ ID NO: 50798 - DNA, 20 bp, Human herpesvirus 4
cctgtaagggcgcacaccac

SEQ ID NO: 50799 - DNA, 20 bp, Human herpesvirus 4
agacccatgagggagtggtg

SEQ ID NO: 50800 - DNA, 20 bp, Human herpesvirus 4
caggcaactacatggggccg

SEQ ID NO: 50801 - DNA, 20 bp, Human herpesvirus 4
ccagccggcgctgaggccct

SEQ ID NO: 50802 - DNA, 20 bp, Human herpesvirus 4
cagccggcgctgaggccctg

SEQ ID NO: 50803 - DNA, 20 bp, Human herpesvirus 4
acaccctcaacccccgagta

SEQ ID NO: 50804 - DNA, 20 bp, Human herpesvirus 4
agggtgtcaacccggcagag

SEQ ID NO: 50805 - DNA, 20 bp, Human herpesvirus 4
atggcatcgtcacgcacagt

SEQ ID NO: 50806 - DNA, 20 bp, Human herpesvirus 4
ttcctcaaggacctaacagg

SEQ ID NO: 50807 - DNA, 20 bp, Human herpesvirus 4
ctcaaggacctaacagggga

SEQ ID NO: 50808 - DNA, 20 bp, Human herpesvirus 4
ggtccttgaggaagaagtgt

SEQ ID NO: 50809 - DNA, 20 bp, Human herpesvirus 4
aggaagaagtgttccaggcc

SEQ ID NO: 50810 - DNA, 20 bp, Human herpesvirus 4
cttccgtttcatgcctccag

SEQ ID NO: 50811 - DNA, 20 bp, Human herpesvirus 4
cgtttcatgcctccagctgc

SEQ ID NO: 50812 - DNA, 20 bp, Human herpesvirus 4
catgcctccagctgcccctg

SEQ ID NO: 50813 - DNA, 20 bp, Human herpesvirus 4
atgcctccagctgcccctga

SEQ ID NO: 50814 - DNA, 20 bp, Human herpesvirus 4
ggacccttgacggatgtctt

SEQ ID NO: 50815 - DNA, 20 bp, Human herpesvirus 4
tcggcgggattcggggccag

SEQ ID NO: 50816 - DNA, 20 bp, Human herpesvirus 4
ggggccagctgctgcgtaac

SEQ ID NO: 50817 - DNA, 20 bp, Human herpesvirus 4
tccaccgacacgcgcacggt

SEQ ID NO: 50818 - DNA, 20 bp, Human herpesvirus 4
cacccgcaccgtgcgcgtgt

SEQ ID NO: 50819 - DNA, 20 bp, Human herpesvirus 4
acccgcaccgtgcgcgtgtc

SEQ ID NO: 50820 - DNA, 20 bp, Human herpesvirus 4
gcggtcgtgtaggtactgac

SEQ ID NO: 50821 - DNA, 20 bp, Human herpesvirus 4
agcacgctctccccggacac

SEQ ID NO: 50822 - DNA, 20 bp, Human herpesvirus 4
ccctcggtggtgtcctgcca

SEQ ID NO: 50823 - DNA, 20 bp, Human herpesvirus 4
cctcggtggtgtcctgccag

SEQ ID NO: 50824 - DNA, 20 bp, Human herpesvirus 4
aaggccgcaactgccaccat

SEQ ID NO: 50825 - DNA, 20 bp, Human herpesvirus 4
aggccgcaactgccaccata

SEQ ID NO: 50826 - DNA, 20 bp, Human herpesvirus 4
cggccttaaaccaggacacg

SEQ ID NO: 50827 - DNA, 20 bp, Human herpesvirus 4
cctcggcgctgggactgcct

SEQ ID NO: 50828 - DNA, 20 bp, Human herpesvirus 4
cgtgcctcgggcctcaacgt

SEQ ID NO: 50829 - DNA, 20 bp, Human herpesvirus 4
aggcccgaggcacggaagag

SEQ ID NO: 50830 - DNA, 20 bp, Human herpesvirus 4
tccccaggcagtcccagcgc

SEQ ID NO: 50831 - DNA, 20 bp, Human herpesvirus 4
ccccaggcagtcccagcgcc

SEQ ID NO: 50832 - DNA, 20 bp, Human herpesvirus 4
tccatggttgagtccgtaaa

SEQ ID NO: 50833 - DNA, 20 bp, Human herpesvirus 4
agtccgtaaaacgagtccgg

SEQ ID NO: 50834 - DNA, 20 bp, Human herpesvirus 4
gctccctcatcgacccggac

SEQ ID NO: 50835 - DNA, 20 bp, Human herpesvirus 4
ctccctcatcgacccggact

SEQ ID NO: 50836 - DNA, 20 bp, Human herpesvirus 4
tacggactcaaccatggaga

SEQ ID NO: 50837 - DNA, 20 bp, Human herpesvirus 4
cttcatacaggcccgcaatt

SEQ ID NO: 50838 - DNA, 20 bp, Human herpesvirus 4
ttcatacaggcccgcaattt

SEQ ID NO: 50839 - DNA, 20 bp, Human herpesvirus 4
atacaggcccgcaatttcca

SEQ ID NO: 50840 - DNA, 20 bp, Human herpesvirus 4
ccatgacagtcccgttggtg

SEQ ID NO: 50841 - DNA, 20 bp, Human herpesvirus 4
catgacagtcccgttggtgg

SEQ ID NO: 50842 - DNA, 20 bp, Human herpesvirus 4
gtatagggcaaggttgggcc

SEQ ID NO: 50843 - DNA, 20 bp, Human herpesvirus 4
ggcccctgggtagtcacgtt

SEQ ID NO: 50844 - DNA, 20 bp, Human herpesvirus 4
agccgcaactcgcgtagcac

SEQ ID NO: 50845 - DNA, 20 bp, Human herpesvirus 4
atcggcagccacgtggtgct

SEQ ID NO: 50846 - DNA, 20 bp, Human herpesvirus 4
tcggcagccacgtggtgcta

SEQ ID NO: 50847 - DNA, 20 bp, Human herpesvirus 4
atagaccccgcccgactgcc

SEQ ID NO: 50848 - DNA, 20 bp, Human herpesvirus 4
agcaggccggtggtggaggt

SEQ ID NO: 50849 - DNA, 20 bp, Human herpesvirus 4
ggcttgccgggcctctttgg

SEQ ID NO: 50850 - DNA, 20 bp, Human herpesvirus 4
gcttgccgggcctctttggc

SEQ ID NO: 50851 - DNA, 20 bp, Human herpesvirus 4
ccgggcctctttggcccccc

SEQ ID NO: 50852 - DNA, 20 bp, Human herpesvirus 4
ggcccccctccacccgtgcc

SEQ ID NO: 50853 - DNA, 20 bp, Human herpesvirus 4
gcccccctccacccgtgcct

SEQ ID NO: 50854 - DNA, 20 bp, Human herpesvirus 4
gactgagccactccggacgc

SEQ ID NO: 50855 - DNA, 20 bp, Human herpesvirus 4
ctttccgcggtggtggccct

SEQ ID NO: 50856 - DNA, 20 bp, Human herpesvirus 4
tttccgcggtggtggccctc

SEQ ID NO: 50857 - DNA, 20 bp, Human herpesvirus 4
ccgcggtggtggccctcggt

SEQ ID NO: 50858 - DNA, 20 bp, Human herpesvirus 4
cgcggtggtggccctcggtg

SEQ ID NO: 50859 - DNA, 20 bp, Human herpesvirus 4
ggacttaatcgctcctgtgc

SEQ ID NO: 50860 - DNA, 20 bp, Human herpesvirus 4
atcgctcctgtgccgctgga

SEQ ID NO: 50861 - DNA, 20 bp, Human herpesvirus 4
gtacatcctagctctggcca

SEQ ID NO: 50862 - DNA, 20 bp, Human herpesvirus 4
tacatcctagctctggccat

SEQ ID NO: 50863 - DNA, 20 bp, Human herpesvirus 4
gcgctccctcatccagcggc

SEQ ID NO: 50864 - DNA, 20 bp, Human herpesvirus 4
agtgcacgcatcttccgttg

SEQ ID NO: 50865 - DNA, 20 bp, Human herpesvirus 4
gtgcacgcatcttccgttgc

SEQ ID NO: 50866 - DNA, 20 bp, Human herpesvirus 4
cgttgcattgacggaagtca

SEQ ID NO: 50867 - DNA, 20 bp, Human herpesvirus 4
cattgacggaagtcatgttg

SEQ ID NO: 50868 - DNA, 20 bp, Human herpesvirus 4
acggaagtcatgttggccac

SEQ ID NO: 50869 - DNA, 20 bp, Human herpesvirus 4
ggctccacaaagacgtactg

SEQ ID NO: 50870 - DNA, 20 bp, Human herpesvirus 4
ctcgttgcgctcgacgaact

SEQ ID NO: 50871 - DNA, 20 bp, Human herpesvirus 4
cgctcgacgaacttctggta

SEQ ID NO: 50872 - DNA, 20 bp, Human herpesvirus 4
gtcgagcgcaacgaggaact

SEQ ID NO: 50873 - DNA, 20 bp, Human herpesvirus 4
gtggagcccaaggggggagt

SEQ ID NO: 50874 - DNA, 20 bp, Human herpesvirus 4
gtgttggcccgcaagaagcc

SEQ ID NO: 50875 - DNA, 20 bp, Human herpesvirus 4
gcccgcaagaagcccttgcc

SEQ ID NO: 50876 - DNA, 20 bp, Human herpesvirus 4
cccgcatcatggggtcgcct

SEQ ID NO: 50877 - DNA, 20 bp, Human herpesvirus 4
tgcccagagaggctgggttg

SEQ ID NO: 50878 - DNA, 20 bp, Human herpesvirus 4
gcccagagaggctgggttga

SEQ ID NO: 50879 - DNA, 20 bp, Human herpesvirus 4
ggcacgctggcgccaccaca

SEQ ID NO: 50880 - DNA, 20 bp, Human herpesvirus 4
ccatcctcgtcaccccccac

SEQ ID NO: 50881 - DNA, 20 bp, Human herpesvirus 4
catcctcgtcaccccccacc

SEQ ID NO: 50882 - DNA, 20 bp, Human herpesvirus 4
gtagaagcacagggggggct

SEQ ID NO: 50883 - DNA, 20 bp, Human herpesvirus 4
taccaagactccctgacggt

SEQ ID NO: 50884 - DNA, 20 bp, Human herpesvirus 4
tggtgaggcagcgtacctgc

SEQ ID NO: 50885 - DNA, 20 bp, Human herpesvirus 4
ctgggtgggggaaagagccc

SEQ ID NO: 50886 - DNA, 20 bp, Human herpesvirus 4
cccccacccagcaacgtggc

SEQ ID NO: 50887 - DNA, 20 bp, Human herpesvirus 4
ccccacccagcaacgtggcc

SEQ ID NO: 50888 - DNA, 20 bp, Human herpesvirus 4
tgatgtacttggaattctca

SEQ ID NO: 50889 - DNA, 20 bp, Human herpesvirus 4
gatgtacttggaattctcaa

SEQ ID NO: 50890 - DNA, 20 bp, Human herpesvirus 4
atgtacttggaattctcaaa

SEQ ID NO: 50891 - DNA, 20 bp, Human herpesvirus 4
gaattctcaaaggcggcacc

SEQ ID NO: 50892 - DNA, 20 bp, Human herpesvirus 4
tcaaaggcggcaccctcgcc

SEQ ID NO: 50893 - DNA, 20 bp, Human herpesvirus 4
attctcaaacagtcccgaga

SEQ ID NO: 50894 - DNA, 20 bp, Human herpesvirus 4
tcaaacagtcccgagaccgg

SEQ ID NO: 50895 - DNA, 20 bp, Human herpesvirus 4
accggcaccgccaggtggtt

SEQ ID NO: 50896 - DNA, 20 bp, Human herpesvirus 4
caggagacgtgggtcccctc

SEQ ID NO: 50897 - DNA, 20 bp, Human herpesvirus 4
cacggcagaggggacccacg

SEQ ID NO: 50898 - DNA, 20 bp, Human herpesvirus 4
aggctggccggggtctcgtg

SEQ ID NO: 50899 - DNA, 20 bp, Human herpesvirus 4
tggacagcgcggcctgcgag

SEQ ID NO: 50900 - DNA, 20 bp, Human herpesvirus 4
taacgatggaatggccacca

SEQ ID NO: 50901 - DNA, 20 bp, Human herpesvirus 4
aacgatggaatggccaccag

SEQ ID NO: 50902 - DNA, 20 bp, Human herpesvirus 4
acgatggaatggccaccagg

SEQ ID NO: 50903 - DNA, 20 bp, Human herpesvirus 4
ccgctgtagagtcgctcctt

SEQ ID NO: 50904 - DNA, 20 bp, Human herpesvirus 4
cgctgtagagtcgctccttg

SEQ ID NO: 50905 - DNA, 20 bp, Human herpesvirus 4
atgctgaagcccggctccac

SEQ ID NO: 50906 - DNA, 20 bp, Human herpesvirus 4
gtggcatcaccgtggagccg

SEQ ID NO: 50907 - DNA, 20 bp, Human herpesvirus 4
tggcatcaccgtggagccgg

SEQ ID NO: 50908 - DNA, 20 bp, Human herpesvirus 4
gcatgccgcccagcctcgca

SEQ ID NO: 50909 - DNA, 20 bp, Human herpesvirus 4
gtgctgggggcaatcgccca

SEQ ID NO: 50910 - DNA, 20 bp, Human herpesvirus 4
gcgaggctgggcggcatgcc

SEQ ID NO: 50911 - DNA, 20 bp, Human herpesvirus 4
cgaggctgggcggcatgcca

SEQ ID NO: 50912 - DNA, 20 bp, Human herpesvirus 4
tacactgcgcgcaggacgct

SEQ ID NO: 50913 - DNA, 20 bp, Human herpesvirus 4
gcccccgatgtcggctgtcc

SEQ ID NO: 50914 - DNA, 20 bp, Human herpesvirus 4
cccccgatgtcggctgtcct

SEQ ID NO: 50915 - DNA, 20 bp, Human herpesvirus 4
tcgtccggcggcgagggcgc

SEQ ID NO: 50916 - DNA, 20 bp, Human herpesvirus 4
agggccatgtacgcggtgtt

SEQ ID NO: 50917 - DNA, 20 bp, Human herpesvirus 4
cctggggggcctttgtcagg

SEQ ID NO: 50918 - DNA, 20 bp, Human herpesvirus 4
ctggggggcctttgtcaggg

SEQ ID NO: 50919 - DNA, 20 bp, Human herpesvirus 4
gtcagggttgtctgtgtcac

SEQ ID NO: 50920 - DNA, 20 bp, Human herpesvirus 4
tcagggttgtctgtgtcacc

SEQ ID NO: 50921 - DNA, 20 bp, Human herpesvirus 4
tctgtgtcacccagcggccc

SEQ ID NO: 50922 - DNA, 20 bp, Human papillomavirus type 71
ggaaatagctggaaaactaa

SEQ ID NO: 50923 - DNA, 20 bp, Human papillomavirus type 71
gaaatagctggaaaactaag

SEQ ID NO: 50924 - DNA, 20 bp, Human papillomavirus type 71
gatattggcaattttcaggc

SEQ ID NO: 50925 - DNA, 20 bp, Human papillomavirus type 71
gcaattttcaggctttgcaa

SEQ ID NO: 50926 - DNA, 20 bp, Human papillomavirus type 71
tcaggctttgcaaacacagt

SEQ ID NO: 50927 - DNA, 20 bp, Human papillomavirus type 71
ttgacctgtattgtcacgag

SEQ ID NO: 50928 - DNA, 20 bp, Human papillomavirus type 71
acctgtattgtcacgagcaa

SEQ ID NO: 50929 - DNA, 20 bp, Human papillomavirus type 71
tcacgagcaatttgccagct

SEQ ID NO: 50930 - DNA, 20 bp, Human papillomavirus type 71
gccagctcagacgaggaaga

SEQ ID NO: 50931 - DNA, 20 bp, Human papillomavirus type 71
ccagctcagacgaggaagat

SEQ ID NO: 50932 - DNA, 20 bp, Human papillomavirus type 71
aaagacttatatgggttatc

SEQ ID NO: 50933 - DNA, 20 bp, Human papillomavirus type 71
aagacttatatgggttatca

SEQ ID NO: 50934 - DNA, 20 bp, Human papillomavirus type 71
tatgggttatcatatatgga

SEQ ID NO: 50935 - DNA, 20 bp, Human papillomavirus type 71
tcatatatggaattggtacg

SEQ ID NO: 50936 - DNA, 20 bp, Human papillomavirus type 71
gtacggcaatttaaaagtaa

SEQ ID NO: 50937 - DNA, 20 bp, Human papillomavirus type 71
agcatgttattaaatatacc

SEQ ID NO: 50938 - DNA, 20 bp, Human papillomavirus type 71
ttaaatataccagaaacaaa

SEQ ID NO: 50939 - DNA, 20 bp, Human papillomavirus type 71
aatataccagaaacaaacat

SEQ ID NO: 50940 - DNA, 20 bp, Human papillomavirus type 71
tattggtttagggcgagcat

SEQ ID NO: 50941 - DNA, 20 bp, Human papillomavirus type 71
ttatttttggtggttctatt

SEQ ID NO: 50942 - DNA, 20 bp, Human papillomavirus type 71
ttagcaagcaattgtcaagc

SEQ ID NO: 50943 - DNA, 20 bp, Human papillomavirus type 71
tagcaagcaattgtcaagcc

SEQ ID NO: 50944 - DNA, 20 bp, Human papillomavirus type 71
agcaagcaattgtcaagcca

SEQ ID NO: 50945 - DNA, 20 bp, Human papillomavirus type 71
gcaagcaattgtcaagccaa

SEQ ID NO: 50946 - DNA, 20 bp, Human papillomavirus type 71
tcaagccaaatatgtgaaag

SEQ ID NO: 50947 - DNA, 20 bp, Human papillomavirus type 71
ttgcatgagcctattacggt

SEQ ID NO: 50948 - DNA, 20 bp, Human papillomavirus type 71
tgcatgagcctattacggtt

SEQ ID NO: 50949 - DNA, 20 bp, Human papillomavirus type 71
gcatgagcctattacggttt

SEQ ID NO: 50950 - DNA, 20 bp, Human papillomavirus type 71
catgagcctattacggtttt

SEQ ID NO: 50951 - DNA, 20 bp, Human papillomavirus type 71
cggtttttgggtggggttgt

SEQ ID NO: 50952 - DNA, 20 bp, Human papillomavirus type 71
aacactggcaacacgtgcga

SEQ ID NO: 50953 - DNA, 20 bp, Human papillomavirus type 71
ttatttaaggcaagggaagc

SEQ ID NO: 50954 - DNA, 20 bp, Human papillomavirus type 71
tttaaggcaagggaagcagg

SEQ ID NO: 50955 - DNA, 20 bp, Human papillomavirus type 71
aaggcaagggaagcaggaat

SEQ ID NO: 50956 - DNA, 20 bp, Human papillomavirus type 71
aggcaagggaagcaggaatt

SEQ ID NO: 50957 - DNA, 20 bp, Human papillomavirus type 71
cgtgacacgagccaggaaat

SEQ ID NO: 50958 - DNA, 20 bp, Human papillomavirus type 71
gcaatcgtatcgcacttcta

SEQ ID NO: 50959 - DNA, 20 bp, Human papillomavirus type 71
caatcgtatcgcacttctac

SEQ ID NO: 50960 - DNA, 20 bp, Human papillomavirus type 71
tacagtgtagcctttttttt

SEQ ID NO: 50961 - DNA, 20 bp, Human papillomavirus type 71
ttttttccagcattgcttag

SEQ ID NO: 50962 - DNA, 20 bp, Human papillomavirus type 71
atgatgcattcgactcctct

SEQ ID NO: 50963 - DNA, 20 bp, Human papillomavirus type 71
tgatgcattcgactcctctg

SEQ ID NO: 50964 - DNA, 20 bp, Human papillomavirus type 71
gactcctctgtgtctagcac

SEQ ID NO: 50965 - DNA, 20 bp, Human papillomavirus type 71
aacctactgaccacggaccc

SEQ ID NO: 50966 - DNA, 20 bp, Human papillomavirus type 71
ggtggtggtggaggcctgtt

SEQ ID NO: 50967 - DNA, 20 bp, Human papillomavirus type 71
ctagccactgtacatattcc

SEQ ID NO: 50968 - DNA, 20 bp, Human papillomavirus type 71
tagccactgtacatattcct

SEQ ID NO: 50969 - DNA, 20 bp, Human papillomavirus type 71
ctaagggcatagaggcctta

SEQ ID NO: 50970 - DNA, 20 bp, Human papillomavirus type 71
ccaggatatatgtcattgtt

SEQ ID NO: 50971 - DNA, 20 bp, Human papillomavirus type 71
tttgcataatctttgtaaat

SEQ ID NO: 50972 - DNA, 20 bp, Human papillomavirus type 71
cctaactgtgacttgtgact

SEQ ID NO: 50973 - DNA, 20 bp, Human papillomavirus type 71
tgactaccacacaaccagcc

SEQ ID NO: 50974 - DNA, 20 bp, Human papillomavirus type 71
tgtacacgtagtagcagtat

SEQ ID NO: 50975 - DNA, 20 bp, Human papillomavirus type 71
gctggttgtgtggtagtcac

SEQ ID NO: 50976 - DNA, 20 bp, Human papillomavirus type 71
tgtggtagtcacaagtcaca

SEQ ID NO: 50977 - DNA, 20 bp, Human papillomavirus type 71
gatggccctgacattgattt

SEQ ID NO: 50978 - DNA, 20 bp, Human papillomavirus type 71
atggccctgacattgatttt

SEQ ID NO: 50979 - DNA, 20 bp, Human papillomavirus type 71
atttttccacctcccatgcc

SEQ ID NO: 50980 - DNA, 20 bp, Human papillomavirus type 71
ttccacctcccatgccacta

SEQ ID NO: 50981 - DNA, 20 bp, Human papillomavirus type 71
tccacctcccatgccactac

SEQ ID NO: 50982 - DNA, 20 bp, Human papillomavirus type 71
ctgttggccatccatatttt

SEQ ID NO: 50983 - DNA, 20 bp, Human papillomavirus type 71
gccatccatattttcctatt

SEQ ID NO: 50984 - DNA, 20 bp, Human papillomavirus type 71
tcctattcgccaggcaagtg

SEQ ID NO: 50985 - DNA, 20 bp, Human papillomavirus type 71
cctattcgccaggcaagtgg

SEQ ID NO: 50986 - DNA, 20 bp, Human papillomavirus type 71
ctattcgccaggcaagtggt

SEQ ID NO: 50987 - DNA, 20 bp, Human papillomavirus type 71
gtggccatccattgtttaac

SEQ ID NO: 50988 - DNA, 20 bp, Human papillomavirus type 71
tttaacaagcttaatgacac

SEQ ID NO: 50989 - DNA, 20 bp, Human papillomavirus type 71
aacaagcttaatgacactga

SEQ ID NO: 50990 - DNA, 20 bp, Human papillomavirus type 71
acaagcttaatgacactgaa

SEQ ID NO: 50991 - DNA, 20 bp, Human papillomavirus type 71
atgacactgaaaatgccacg

SEQ ID NO: 50992 - DNA, 20 bp, Human papillomavirus type 71
tgcagccctgcaaacaaata

SEQ ID NO: 50993 - DNA, 20 bp, Human papillomavirus type 71
gcagccctgcaaacaaatag

SEQ ID NO: 50994 - DNA, 20 bp, Human papillomavirus type 71
cagccctgcaaacaaatagg

SEQ ID NO: 50995 - DNA, 20 bp, Human papillomavirus type 71
ccttggatattgttactaca

SEQ ID NO: 50996 - DNA, 20 bp, Human papillomavirus type 71
gatattgttactacaacatg

SEQ ID NO: 50997 - DNA, 20 bp, Human papillomavirus type 71
cctcagagtcacagttgttt

SEQ ID NO: 50998 - DNA, 20 bp, Human papillomavirus type 71
tttaacaagccttactggct

SEQ ID NO: 50999 - DNA, 20 bp, Human papillomavirus type 71
aacaagccttactggctaca

SEQ ID NO: 51000 - DNA, 20 bp, Human papillomavirus type 71
acaagccttactggctacaa

SEQ ID NO: 51001 - DNA, 20 bp, Human papillomavirus type 71
ctggctacaacgtgcacagg

SEQ ID NO: 51002 - DNA, 20 bp, Human papillomavirus type 71
tggttccttaccacctccta

SEQ ID NO: 51003 - DNA, 20 bp, Human papillomavirus type 71
ggttccttaccacctcctac

SEQ ID NO: 51004 - DNA, 20 bp, Human papillomavirus type 71
gttccttaccacctcctact

SEQ ID NO: 51005 - DNA, 20 bp, Human papillomavirus type 71
cttaccacctcctactgcta

SEQ ID NO: 51006 - DNA, 20 bp, Human papillomavirus type 71
ccacctcctactgctagtct

SEQ ID NO: 51007 - DNA, 20 bp, Human papillomavirus type 71
tttggttgcacccctgtgag

SEQ ID NO: 51008 - DNA, 20 bp, Human papillomavirus type 71
ggttgcacccctgtgagtaa

SEQ ID NO: 51009 - DNA, 20 bp, Human papillomavirus type 71
gttgcacccctgtgagtaag

SEQ ID NO: 51010 - DNA, 20 bp, Human papillomavirus type 71
cacccctgtgagtaagtgtg

SEQ ID NO: 51011 - DNA, 20 bp, Human papillomavirus type 71
ctgaccagtgaccatgccct

SEQ ID NO: 51012 - DNA, 20 bp, Human papillomavirus type 71
gcacactataaatgcatgtt

SEQ ID NO: 51013 - DNA, 20 bp, Human papillomavirus type 71
taattaactttaatacatgt

SEQ ID NO: 51014 - DNA, 20 bp, Human papillomavirus type 71
actttaatacatgtgttact

SEQ ID NO: 51015 - DNA, 20 bp, Human papillomavirus type 71
aatacatgtgttactcaccg

SEQ ID NO: 51016 - DNA, 20 bp, Human papillomavirus type 71
atacatgtgttactcaccgt

SEQ ID NO: 51017 - DNA, 20 bp, Human papillomavirus type 112
aaacagacaacaagtaaaga

SEQ ID NO: 51018 - DNA, 20 bp, Human papillomavirus type 112
ggctaataccacttctgtca

SEQ ID NO: 51019 - DNA, 20 bp, Human papillomavirus type 112
gctaataccacttctgtcac

SEQ ID NO: 51020 - DNA, 20 bp, Human papillomavirus type 112
tgtcactggctgtttgcctt

SEQ ID NO: 51021 - DNA, 20 bp, Human papillomavirus type 112
gcctttgtaccgggagtggt

SEQ ID NO: 51022 - DNA, 20 bp, Human papillomavirus type 112
gaaataaatttggaagaatt

SEQ ID NO: 51023 - DNA, 20 bp, Human papillomavirus type 112
ggaagaattagtattaccag

SEQ ID NO: 51024 - DNA, 20 bp, Human papillomavirus type 112
gaagaattagtattaccaga

SEQ ID NO: 51025 - DNA, 20 bp, Human papillomavirus type 112
gtattaccagaaaatctttt

SEQ ID NO: 51026 - DNA, 20 bp, Human papillomavirus type 112
ccagaaaatcttttagcaga

SEQ ID NO: 51027 - DNA, 20 bp, Human papillomavirus type 112
ccttgcatttttcaacagtc

SEQ ID NO: 51028 - DNA, 20 bp, Human papillomavirus type 112
catttttcaacagtcagtta

SEQ ID NO: 51029 - DNA, 20 bp, Human papillomavirus type 112
ttcaacagtcagttagcaga

SEQ ID NO: 51030 - DNA, 20 bp, Human papillomavirus type 112
tcaacagtcagttagcagag

SEQ ID NO: 51031 - DNA, 20 bp, Human papillomavirus type 112
caacagtcagttagcagagg

SEQ ID NO: 51032 - DNA, 20 bp, Human papillomavirus type 112
tagaatttaaaacaggaaaa

SEQ ID NO: 51033 - DNA, 20 bp, Human papillomavirus type 112
aaaacaggaaaaagtagaga

SEQ ID NO: 51034 - DNA, 20 bp, Human papillomavirus type 112
aaacaggaaaaagtagagaa

SEQ ID NO: 51035 - DNA, 20 bp, Human papillomavirus type 112
ccaacatgctttgtaaactt

SEQ ID NO: 51036 - DNA, 20 bp, Human papillomavirus type 112
gtaaacttttaaatataaaa

SEQ ID NO: 51037 - DNA, 20 bp, Human papillomavirus type 112
aagactgtgcaataatggta

SEQ ID NO: 51038 - DNA, 20 bp, Human papillomavirus type 112
taaaagatatgaaatgcgcc

SEQ ID NO: 51039 - DNA, 20 bp, Human papillomavirus type 112
cttagaatatgatgacactg

SEQ ID NO: 51040 - DNA, 20 bp, Human papillomavirus type 112
gaatatgatgacactgtaga

SEQ ID NO: 51041 - DNA, 20 bp, Human papillomavirus type 112
taagcaacatttatttatcc

SEQ ID NO: 51042 - DNA, 20 bp, Human papillomavirus type 112
caagactgtagtgctgaatt

SEQ ID NO: 51043 - DNA, 20 bp, Human papillomavirus type 112
ttaaatacccaacccaaaaa

SEQ ID NO: 51044 - DNA, 20 bp, Human papillomavirus type 112
aatacccaacccaaaaactg

SEQ ID NO: 51045 - DNA, 20 bp, Human papillomavirus type 112
caaaaaagctggctattccg

SEQ ID NO: 51046 - DNA, 20 bp, Human papillomavirus type 112
aaaaaagctggctattccgt

SEQ ID NO: 51047 - DNA, 20 bp, Human papillomavirus type 112
gtcttcgagctggaggacga

SEQ ID NO: 51048 - DNA, 20 bp, Human papillomavirus type 112
gagctggaggacgaagacaa

SEQ ID NO: 51049 - DNA, 20 bp, Human papillomavirus type 112
gtgcagcagatcgctgaggg

SEQ ID NO: 51050 - DNA, 20 bp, Human papillomavirus type 112
ttcttctcgttgatacggta

SEQ ID NO: 51051 - DNA, 20 bp, Human papillomavirus type 112
ttctcgttgatacggtagag

SEQ ID NO: 51052 - DNA, 20 bp, Human papillomavirus type 112
ggtggtttgggtatagggtc

SEQ ID NO: 51053 - DNA, 20 bp, Human papillomavirus type 112
gggtatagggtcgggttctg

SEQ ID NO: 51054 - DNA, 20 bp, Human papillomavirus type 112
ggtatagggtcgggttctgg

SEQ ID NO: 51055 - DNA, 20 bp, Human papillomavirus type 112
tggggcgggtgccactggat

SEQ ID NO: 51056 - DNA, 20 bp, Human papillomavirus type 112
cgtcccataacagaaaatat

SEQ ID NO: 51057 - DNA, 20 bp, Human papillomavirus type 112
atggtcaccctactgttcta

SEQ ID NO: 51058 - DNA, 20 bp, Human papillomavirus type 112
tacatggccaagaagacata

SEQ ID NO: 51059 - DNA, 20 bp, Human papillomavirus type 112
caagtcacaccccctgaccc

SEQ ID NO: 51060 - DNA, 20 bp, Human papillomavirus type 112
ctcccagattggcatttgaa

SEQ ID NO: 51061 - DNA, 20 bp, Human papillomavirus type 112
gcatttgaaaatccacgtga

SEQ ID NO: 51062 - DNA, 20 bp, Human papillomavirus type 112
ctaccagaagtggtaatatt

SEQ ID NO: 51063 - DNA, 20 bp, Human papillomavirus type 112
taccagaagtggtaatattt

SEQ ID NO: 51064 - DNA, 20 bp, Human papillomavirus type 112
tgacacaaaaggtgcattac

SEQ ID NO: 51065 - DNA, 20 bp, Human papillomavirus type 112
gacacaaaaggtgcattacc

SEQ ID NO: 51066 - DNA, 20 bp, Human papillomavirus type 112
acacaaaaggtgcattacca

SEQ ID NO: 51067 - DNA, 20 bp, Human papillomavirus type 112
acattgatccatttggatca

SEQ ID NO: 51068 - DNA, 20 bp, Human papillomavirus type 112
cattgatccatttggatcag

SEQ ID NO: 51069 - DNA, 20 bp, Human papillomavirus type 112
atccatttggatcagacttt

SEQ ID NO: 51070 - DNA, 20 bp, Human papillomavirus type 112
ggatcagacttttatttaca

SEQ ID NO: 51071 - DNA, 20 bp, Human papillomavirus type 112
gatcagacttttatttacat

SEQ ID NO: 51072 - DNA, 20 bp, Human papillomavirus type 112
tcctgctgcagaaacagacg

SEQ ID NO: 51073 - DNA, 20 bp, Human papillomavirus type 112
atcttagtatggatcctaag

SEQ ID NO: 51074 - DNA, 20 bp, Human papillomavirus type 112
gtatggatcctaagcaggta

SEQ ID NO: 51075 - DNA, 20 bp, Human papillomavirus type 112
ttaatagttggttgtgaacc

SEQ ID NO: 51076 - DNA, 20 bp, Human papillomavirus type 112
atagttggttgtgaaccagc

SEQ ID NO: 51077 - DNA, 20 bp, Human papillomavirus type 112
aatttttggaacgtagattt

SEQ ID NO: 51078 - DNA, 20 bp, Human papillomavirus type 112
atttttggaacgtagattta

SEQ ID NO: 51079 - DNA, 20 bp, Human papillomavirus type 112
ttggaacgtagatttaacag

SEQ ID NO: 51080 - DNA, 20 bp, Human papillomavirus type 112
tggaacgtagatttaacaga

SEQ ID NO: 51081 - DNA, 20 bp, Human papillomavirus type 112
ggaacgtagatttaacagag

SEQ ID NO: 51082 - DNA, 20 bp, Human papillomavirus type 90
tgcggaacagcattaacaga

SEQ ID NO: 51083 - DNA, 20 bp, Human papillomavirus type 90
gcggaacagcattaacagag

SEQ ID NO: 51084 - DNA, 20 bp, Human papillomavirus type 90
cggaacagcattaacagagg

SEQ ID NO: 51085 - DNA, 20 bp, Human papillomavirus type 90
acagaggaggaggttgtatc

SEQ ID NO: 51086 - DNA, 20 bp, Human papillomavirus type 90
tatgcaaacgatacaacctc

SEQ ID NO: 51087 - DNA, 20 bp, Human papillomavirus type 90
tcagtgaaggcaaacggttc

SEQ ID NO: 51088 - DNA, 20 bp, Human papillomavirus type 90
cataaaatagctgggctttg

SEQ ID NO: 51089 - DNA, 20 bp, Human papillomavirus type 90
ggcgaggcgcttgcctgcag

SEQ ID NO: 51090 - DNA, 20 bp, Human papillomavirus type 90
gcgaggcgcttgcctgcagt

SEQ ID NO: 51091 - DNA, 20 bp, Human papillomavirus type 90
cctgcagtgttggaaaccat

SEQ ID NO: 51092 - DNA, 20 bp, Human papillomavirus type 90
ttgtaggtgttgctgtacag

SEQ ID NO: 51093 - DNA, 20 bp, Human papillomavirus type 90
taggtgttgctgtacagtaa

SEQ ID NO: 51094 - DNA, 20 bp, Human papillomavirus type 90
ctgtacagtaaggctggtgg

SEQ ID NO: 51095 - DNA, 20 bp, Human papillomavirus type 90
tgttgggcgcactgcatata

SEQ ID NO: 51096 - DNA, 20 bp, Human papillomavirus type 90
ggcgcactgcatatagtgtg

SEQ ID NO: 51097 - DNA, 20 bp, Human papillomavirus type 90
attttattgataatagtagg

SEQ ID NO: 51098 - DNA, 20 bp, Human papillomavirus type 90
tattgataatagtaggcatc

SEQ ID NO: 51099 - DNA, 20 bp, Human papillomavirus type 90
attgataatagtaggcatcc

SEQ ID NO: 51100 - DNA, 20 bp, Human papillomavirus type 90
ttgataatagtaggcatccc

SEQ ID NO: 51101 - DNA, 20 bp, Human papillomavirus type 90
ataatagtaggcatcccggg

SEQ ID NO: 51102 - DNA, 20 bp, Human papillomavirus type 90
acgcgacagaggaccaggta

SEQ ID NO: 51103 - DNA, 20 bp, Human papillomavirus type 90
tcgctcctcctcctccgttt

SEQ ID NO: 51104 - DNA, 20 bp, Human papillomavirus type 90
cctgtaccccccctgtgcct

SEQ ID NO: 51105 - DNA, 20 bp, Human papillomavirus type 90
ctgtaccccccctgtgcctg

SEQ ID NO: 51106 - DNA, 20 bp, Human papillomavirus type 90
cccctactacctggtcctct

SEQ ID NO: 51107 - DNA, 20 bp, Human papillomavirus type 90
ggactgggtaatatgtgcat

SEQ ID NO: 51108 - DNA, 20 bp, Human papillomavirus type 90
gactgggtaatatgtgcatt

SEQ ID NO: 51109 - DNA, 20 bp, Human papillomavirus type 90
ggcgtgtactgcacagttgc

SEQ ID NO: 51110 - DNA, 20 bp, Human papillomavirus type 90
gcgtgtactgcacagttgca

SEQ ID NO: 51111 - DNA, 20 bp, Human papillomavirus type 90
cagagggtgtcaaaaccctt

SEQ ID NO: 51112 - DNA, 20 bp, Human papillomavirus type 90
gtataaagcaggcatgggca

SEQ ID NO: 51113 - DNA, 20 bp, Human papillomavirus type 90
gagaaacaccagaatggatt

SEQ ID NO: 51114 - DNA, 20 bp, Human papillomavirus type 90
taagacaaacagttgtgggg

SEQ ID NO: 51115 - DNA, 20 bp, Human papillomavirus type 90
tagactgtgccccacaactg

SEQ ID NO: 51116 - DNA, 20 bp, Human papillomavirus type 90
gtcttacaatccattctggt

SEQ ID NO: 51117 - DNA, 20 bp, Human papillomavirus type 90
caaacgggcagagcaggcac

SEQ ID NO: 51118 - DNA, 20 bp, Human papillomavirus type 90
agaagtgcaaagatatcaga

SEQ ID NO: 51119 - DNA, 20 bp, Human papillomavirus type 90
gaagtgcaaagatatcagag

SEQ ID NO: 51120 - DNA, 20 bp, Human papillomavirus type 90
gcacttctaaatcttatcca

SEQ ID NO: 51121 - DNA, 20 bp, Human papillomavirus type 90
cacttctaaatcttatccat

SEQ ID NO: 51122 - DNA, 20 bp, Human papillomavirus type 90
cgcttcctaggaggggttgt

SEQ ID NO: 51123 - DNA, 20 bp, Human papillomavirus type 90
ctaggaggggttgtgatttc

SEQ ID NO: 51124 - DNA, 20 bp, Human papillomavirus type 90
tgatttcctatgccaactcc

SEQ ID NO: 51125 - DNA, 20 bp, Human papillomavirus type 90
cctatgccaactccaccagc

SEQ ID NO: 51126 - DNA, 20 bp, Human papillomavirus type 90
ctatgccaactccaccagcc

SEQ ID NO: 51127 - DNA, 20 bp, Human papillomavirus type 90
ttacgtagtagactgcagct

SEQ ID NO: 51128 - DNA, 20 bp, Human papillomavirus type 90
tacgtagtagactgcagctg

SEQ ID NO: 51129 - DNA, 20 bp, Human papillomavirus type 90
acgtagtagactgcagctgt

SEQ ID NO: 51130 - DNA, 20 bp, Human papillomavirus type 90
cgtagtagactgcagctgtt

SEQ ID NO: 51131 - DNA, 20 bp, Human papillomavirus type 90
acctttcctaatgcatttcc

SEQ ID NO: 51132 - DNA, 20 bp, Human papillomavirus type 90
gtgtgtaaagtatagtcctg

SEQ ID NO: 51133 - DNA, 20 bp, Human papillomavirus type 90
gtccatgtatcatcatcacc

SEQ ID NO: 51134 - DNA, 20 bp, Human papillomavirus type 90
gtacatatatatacctccag

SEQ ID NO: 51135 - DNA, 20 bp, Human papillomavirus type 90
tacatatatatacctccagc

SEQ ID NO: 51136 - DNA, 20 bp, Human papillomavirus type 90
ggccccgcgtcgccacacgt

SEQ ID NO: 51137 - DNA, 20 bp, Human papillomavirus type 90
tcacgtgccagccgctggat

SEQ ID NO: 51138 - DNA, 20 bp, Human papillomavirus type 90
tgtggagtcgggatgctgat

SEQ ID NO: 51139 - DNA, 20 bp, Human papillomavirus type 90
tgcggcggcggcacgtgtgg

SEQ ID NO: 51140 - DNA, 20 bp, Human papillomavirus type 90
agcaaagtaacctccacctg

SEQ ID NO: 51141 - DNA, 20 bp, Human papillomavirus type 90
gcaaagtaacctccacctgg

SEQ ID NO: 51142 - DNA, 20 bp, Human papillomavirus type 90
caaaggctgatttttcattg

SEQ ID NO: 51143 - DNA, 20 bp, Human papillomavirus type 90
ttcattggtggtgttactgc

SEQ ID NO: 51144 - DNA, 20 bp, Human papillomavirus type 90
tcattggtggtgttactgca

SEQ ID NO: 51145 - DNA, 20 bp, Human papillomavirus type 90
ctacttgtctgcctggacac

SEQ ID NO: 51146 - DNA, 20 bp, Human papillomavirus type 90
tctgcctggacacaactgct

SEQ ID NO: 51147 - DNA, 20 bp, Human papillomavirus type 90
ttttggctgtctatccttcc

SEQ ID NO: 51148 - DNA, 20 bp, Human papillomavirus type 90
tggctgtctatccttcctgg

SEQ ID NO: 51149 - DNA, 20 bp, Human papillomavirus type 90
ggctgtctatccttcctggc

SEQ ID NO: 51150 - DNA, 20 bp, Human papillomavirus type 90
tagtacgtgatagagatggg

SEQ ID NO: 51151 - DNA, 20 bp, Human papillomavirus type 90
ccccccatctctatcacgta

SEQ ID NO: 51152 - DNA, 20 bp, Human papillomavirus type 90
gaacagggtccggcactggt

SEQ ID NO: 51153 - DNA, 20 bp, Human papillomavirus type 90
ggacccgaccccccactgtt

SEQ ID NO: 51154 - DNA, 20 bp, Human papillomavirus type 90
tggatgttggccctcctgcc

SEQ ID NO: 51155 - DNA, 20 bp, Human papillomavirus type 90
ttatcacagcctgaaacact

SEQ ID NO: 51156 - DNA, 20 bp, Human papillomavirus type 90
tatcacagcctgaaacactt

SEQ ID NO: 51157 - DNA, 20 bp, Human papillomavirus type 90
atcacagcctgaaacacttg

SEQ ID NO: 51158 - DNA, 20 bp, Human papillomavirus type 90
tcacagcctgaaacacttgt

SEQ ID NO: 51159 - DNA, 20 bp, Human papillomavirus type 90
ttacctatgacaatcctgta

SEQ ID NO: 51160 - DNA, 20 bp, Human papillomavirus type 90
gccatccttattttgctatc

SEQ ID NO: 51161 - DNA, 20 bp, Human papillomavirus type 90
ttttgctatcaaaaagcaat

SEQ ID NO: 51162 - DNA, 20 bp, Human papillomavirus type 90
tgctatcaaaaagcaatcag

SEQ ID NO: 51163 - DNA, 20 bp, Human papillomavirus type 90
gctatcaaaaagcaatcagg

SEQ ID NO: 51164 - DNA, 20 bp, Human papillomavirus type 90
ctatcaaaaagcaatcagga

SEQ ID NO: 51165 - DNA, 20 bp, Human papillomavirus type 90
atatgatgttgtgcctggcg

SEQ ID NO: 51166 - DNA, 20 bp, Human papillomavirus type 90
tatgatgttgtgcctggcga

SEQ ID NO: 51167 - DNA, 20 bp, Human papillomavirus type 90
tgcctggcgatgacacccgg

SEQ ID NO: 51168 - DNA, 20 bp, Human papillomavirus type 90
ctatggactataagcaaacc

SEQ ID NO: 51169 - DNA, 20 bp, Human papillomavirus type 90
attatagggtgcaaacctcc

SEQ ID NO: 51170 - DNA, 20 bp, Human papillomavirus type 90
tttgcagatggcagctgagc

SEQ ID NO: 51171 - DNA, 20 bp, Human papillomavirus type 90
ttgcagatggcagctgagcc

SEQ ID NO: 51172 - DNA, 20 bp, Human papillomavirus type 90
tgcagatggcagctgagcca

SEQ ID NO: 51173 - DNA, 20 bp, Human papillomavirus type 90
gcagatggcagctgagccat

SEQ ID NO: 51174 - DNA, 20 bp, Human papillomavirus type 90
cagatggcagctgagccata

SEQ ID NO: 51175 - DNA, 20 bp, Human papillomavirus type 90
ttgtaactgtggttgatact

SEQ ID NO: 51176 - DNA, 20 bp, Human papillomavirus type 90
tgtaactgtggttgatacta

SEQ ID NO: 51177 - DNA, 20 bp, Human papillomavirus type 90
gtaactgtggttgatactac

SEQ ID NO: 51178 - DNA, 20 bp, Human papillomavirus type 90
taactgtggttgatactaca

SEQ ID NO: 51179 - DNA, 20 bp, Human papillomavirus type 90
atactacacgtagcaccaat

SEQ ID NO: 51180 - DNA, 20 bp, Human papillomavirus type 90
tgtgtgtgtctgttgtatgc

SEQ ID NO: 51181 - DNA, 20 bp, Human papillomavirus type 90
tatgctgatgtttactgtgt

SEQ ID NO: 51182 - DNA, 20 bp, Human papillomavirus type 90
actgtgtctgtacacgggtt

SEQ ID NO: 51183 - DNA, 20 bp, Human papillomavirus type 90
ctgtgtctgtacacgggttc

SEQ ID NO: 51184 - DNA, 20 bp, Human papillomavirus type 90
cttgtactgttgtgtatgta

SEQ ID NO: 51185 - DNA, 20 bp, Human papillomavirus type 90
aatacccccggaccgatttc

SEQ ID NO: 51186 - DNA, 20 bp, Human papillomavirus type 90
atacccccggaccgatttcg

SEQ ID NO: 51187 - DNA, 20 bp, Human papillomavirus type 90
cggtcgctcccggtttcggt

SEQ ID NO: 51188 - DNA, 20 bp, Human papillomavirus type 90
ggtcgctcccggtttcggtc

SEQ ID NO: 51189 - DNA, 20 bp, Human papillomavirus type 90
cggtcgtgcacaacatggcg

SEQ ID NO: 51190 - DNA, 20 bp, Hepatitis C virus
acgcagaaagcgtctagcca

SEQ ID NO: 51191 - DNA, 20 bp, Hepatitis C virus
gtatgagtgtcgtacagcct

SEQ ID NO: 51192 - DNA, 20 bp, Hepatitis C virus
ctgcgtgaagacagtagttc

SEQ ID NO: 51193 - DNA, 20 bp, Hepatitis C virus
tgcgtgaagacagtagttcc

SEQ ID NO: 51194 - DNA, 20 bp, Hepatitis C virus
agtttccgggcggcggccag

SEQ ID NO: 51195 - DNA, 20 bp, Hepatitis C virus
ccgggcggcggccagatcgt

SEQ ID NO: 51196 - DNA, 20 bp, Hepatitis C virus
cgggcggcggccagatcgtt

SEQ ID NO: 51197 - DNA, 20 bp, Hepatitis C virus
gcggagtatacttgttgccg

SEQ ID NO: 51198 - DNA, 20 bp, Hepatitis C virus
ttgccgcgcaggggccccag

SEQ ID NO: 51199 - DNA, 20 bp, Hepatitis C virus
gccgacctcatggggtacat

SEQ ID NO: 51200 - DNA, 20 bp, Hepatitis C virus
ccgacctcatggggtacatc

SEQ ID NO: 51201 - DNA, 20 bp, Hepatitis C virus
accccgtcctccaggactct

SEQ ID NO: 51202 - DNA, 20 bp, Hepatitis C virus
gggtatcgatgaccttaccc

SEQ ID NO: 51203 - DNA, 20 bp, Hepatitis C virus
ggtgagaccggtatccagca

SEQ ID NO: 51204 - DNA, 20 bp, Hepatitis C virus
cccactttctcgcacgggac

SEQ ID NO: 51205 - DNA, 20 bp, Hepatitis C virus
ctcgcacgggacgcacccgg

SEQ ID NO: 51206 - DNA, 20 bp, Hepatitis C virus
tcgcacgggacgcacccggg

SEQ ID NO: 51207 - DNA, 20 bp, Hepatitis C virus
gcgtacgcgatgcgtgtccc

SEQ ID NO: 51208 - DNA, 20 bp, Hepatitis C virus
tagacatcattagcggggct

SEQ ID NO: 51209 - DNA, 20 bp, Hepatitis C virus
gcggggctcattggggcgtc

SEQ ID NO: 51210 - DNA, 20 bp, Hepatitis C virus
gggcgtcatgttcggcttgg

SEQ ID NO: 51211 - DNA, 20 bp, Hepatitis C virus
ggcttggcctacttctctat

SEQ ID NO: 51212 - DNA, 20 bp, Hepatitis C virus
atcgcgtctctgttctacac

SEQ ID NO: 51213 - DNA, 20 bp, Hepatitis C virus
tcgcgtctctgttctacacc

SEQ ID NO: 51214 - DNA, 20 bp, Hepatitis C virus
tacacccacagcttcaactc

SEQ ID NO: 51215 - DNA, 20 bp, Hepatitis C virus
aactcgtcaggatgtcccga

SEQ ID NO: 51216 - DNA, 20 bp, Hepatitis C virus
cgggtgggatggggcgcctt

SEQ ID NO: 51217 - DNA, 20 bp, Hepatitis C virus
tggctacaccaagacttgcg

SEQ ID NO: 51218 - DNA, 20 bp, Hepatitis C virus
cggcgcaccaccctgccgta

SEQ ID NO: 51219 - DNA, 20 bp, Hepatitis C virus
aacgccagcacggacctgtt

SEQ ID NO: 51220 - DNA, 20 bp, Hepatitis C virus
tgccccacggactgttttag

SEQ ID NO: 51221 - DNA, 20 bp, Hepatitis C virus
taggaagcatcctgatacca

SEQ ID NO: 51222 - DNA, 20 bp, Hepatitis C virus
caacttggaggacagagaca

SEQ ID NO: 51223 - DNA, 20 bp, Hepatitis C virus
gaggacagagacagaagtca

SEQ ID NO: 51224 - DNA, 20 bp, Hepatitis C virus
gttgcactccaccacggaat

SEQ ID NO: 51225 - DNA, 20 bp, Hepatitis C virus
ttgcactccaccacggaatg

SEQ ID NO: 51226 - DNA, 20 bp, Hepatitis C virus
cactccaccacggaatgggc

SEQ ID NO: 51227 - DNA, 20 bp, Hepatitis C virus
ctatattttgtcatcttttt

SEQ ID NO: 51228 - DNA, 20 bp, Hepatitis C virus
tgtcatctttttcgtggctg

SEQ ID NO: 51229 - DNA, 20 bp, Hepatitis C virus
gtcatctttttcgtggctgc

SEQ ID NO: 51230 - DNA, 20 bp, Hepatitis C virus
tcatctttttcgtggctgct

SEQ ID NO: 51231 - DNA, 20 bp, Hepatitis C virus
ttcgtggctgcttggtacat

SEQ ID NO: 51232 - DNA, 20 bp, Hepatitis C virus
gacataaccaagtggctctt

SEQ ID NO: 51233 - DNA, 20 bp, Hepatitis C virus
acataaccaagtggctcttg

SEQ ID NO: 51234 - DNA, 20 bp, Hepatitis C virus
gcggtgcttgggcctgctta

SEQ ID NO: 51235 - DNA, 20 bp, Hepatitis C virus
ggcctgcttacctcctaaaa

SEQ ID NO: 51236 - DNA, 20 bp, Hepatitis C virus
cctcctaaaaggtgctttga

SEQ ID NO: 51237 - DNA, 20 bp, Hepatitis C virus
tacacggacttcccgtgtcc

SEQ ID NO: 51238 - DNA, 20 bp, Hepatitis C virus
acacggacttcccgtgtccg

SEQ ID NO: 51239 - DNA, 20 bp, Hepatitis C virus
cacggacttcccgtgtccgc

SEQ ID NO: 51240 - DNA, 20 bp, Hepatitis C virus
ccgtgtccgcccgacttggt

SEQ ID NO: 51241 - DNA, 20 bp, Hepatitis C virus
gtcgggaggtcctccttggc

SEQ ID NO: 51242 - DNA, 20 bp, Hepatitis C virus
gtagggtggcccagcccccc

SEQ ID NO: 51243 - DNA, 20 bp, Hepatitis C virus
agtcccaggggggctgggcc

SEQ ID NO: 51244 - DNA, 20 bp, Hepatitis C virus
gtcccaggggggctgggcca

SEQ ID NO: 51245 - DNA, 20 bp, Hepatitis C virus
ttgccagctccatggtagac

SEQ ID NO: 51246 - DNA, 20 bp, Hepatitis C virus
ccagctccatggtagacagt

SEQ ID NO: 51247 - DNA, 20 bp, Hepatitis C virus
agtgacaacagcacaccacc

SEQ ID NO: 51248 - DNA, 20 bp, Hepatitis C virus
gtgacaacagcacaccacct

SEQ ID NO: 51249 - DNA, 20 bp, Hepatitis C virus
catgccccgactggcagtgg

SEQ ID NO: 51250 - DNA, 20 bp, Hepatitis C virus
ggtgctctttccactgccag

SEQ ID NO: 51251 - DNA, 20 bp, Hepatitis C virus
gtgctctttccactgccagt

SEQ ID NO: 51252 - DNA, 20 bp, Hepatitis C virus
gcatcggaacagtccttgat

SEQ ID NO: 51253 - DNA, 20 bp, Hepatitis C virus
atcaagcagagacagctggg

SEQ ID NO: 51254 - DNA, 20 bp, Hepatitis C virus
atcaaggactgttccgatgc

SEQ ID NO: 51255 - DNA, 20 bp, Hepatitis C virus
cgatgccaaggatggtggta

SEQ ID NO: 51256 - DNA, 20 bp, Hepatitis C virus
atcacatatgatgatgtcgt

SEQ ID NO: 51257 - DNA, 20 bp, Hepatitis C virus
gacgtctccgtaataccaac

SEQ ID NO: 51258 - DNA, 20 bp, Hepatitis C virus
gtattacggagacgtccaac

SEQ ID NO: 51259 - DNA, 20 bp, Hepatitis C virus
cggagacgtccaaccctctg

SEQ ID NO: 51260 - DNA, 20 bp, Hepatitis C virus
caacacgcccggtttgcctg

SEQ ID NO: 51261 - DNA, 20 bp, Hepatitis C virus
aacacgcccggtttgcctgt

SEQ ID NO: 51262 - DNA, 20 bp, Hepatitis C virus
gcctgtgtgccaagaccatc

SEQ ID NO: 51263 - DNA, 20 bp, Hepatitis C virus
cctgtgtgccaagaccatct

SEQ ID NO: 51264 - DNA, 20 bp, Hepatitis C virus
gcacacaggcaaaccgggcg

SEQ ID NO: 51265 - DNA, 20 bp, Hepatitis C virus
ggctctgttaccaacgaggt

SEQ ID NO: 51266 - DNA, 20 bp, Hepatitis C virus
ccaacgaggtcaccctcaca

SEQ ID NO: 51267 - DNA, 20 bp, Hepatitis C virus
catgcaggtggcgatgtatt

SEQ ID NO: 51268 - DNA, 20 bp, Hepatitis C virus
cgtcacgggatgtgtgaggg

SEQ ID NO: 51269 - DNA, 20 bp, Hepatitis C virus
gtcacgggatgtgtgagggt

SEQ ID NO: 51270 - DNA, 20 bp, Hepatitis C virus
ttgcagcaagcttccaaaca

SEQ ID NO: 51271 - DNA, 20 bp, Hepatitis C virus
cagcaagcttccaaacaagc

SEQ ID NO: 51272 - DNA, 20 bp, Hepatitis C virus
caaacaagctcaagacatac

SEQ ID NO: 51273 - DNA, 20 bp, Hepatitis C virus
atggcccaaggtagaacaat

SEQ ID NO: 51274 - DNA, 20 bp, Hepatitis C virus
tgggccaaacacatgtggaa

SEQ ID NO: 51275 - DNA, 20 bp, Hepatitis C virus
cgggggctctcgtcgcattc

SEQ ID NO: 51276 - DNA, 20 bp, Hepatitis C virus
gggggctctcgtcgcattca

SEQ ID NO: 51277 - DNA, 20 bp, Hepatitis C virus
aagatcatgtctggcgagaa

SEQ ID NO: 51278 - DNA, 20 bp, Hepatitis C virus
ctgcctggaattctgtctcc

SEQ ID NO: 51279 - DNA, 20 bp, Hepatitis C virus
tgtctccgggtgccttggta

SEQ ID NO: 51280 - DNA, 20 bp, Hepatitis C virus
cctatcaattgttacacgga

SEQ ID NO: 51281 - DNA, 20 bp, Hepatitis C virus
ctatcaattgttacacggag

SEQ ID NO: 51282 - DNA, 20 bp, Hepatitis C virus
ttacacggagggccagtgcg

SEQ ID NO: 51283 - DNA, 20 bp, Hepatitis C virus
cacggagggccagtgcgtgc

SEQ ID NO: 51284 - DNA, 20 bp, Hepatitis C virus
aaggtcgccatctggagggt

SEQ ID NO: 51285 - DNA, 20 bp, Hepatitis C virus
atgtccatgctaacagatcc

SEQ ID NO: 51286 - DNA, 20 bp, Hepatitis C virus
agcgcgggggtcacccccat

SEQ ID NO: 51287 - DNA, 20 bp, Hepatitis C virus
gcgcgggggtcacccccatc

SEQ ID NO: 51288 - DNA, 20 bp, Hepatitis C virus
cctcggatgggggtgacccc

SEQ ID NO: 51289 - DNA, 20 bp, Hepatitis C virus
gcatggacatcaatacgtct

SEQ ID NO: 51290 - DNA, 20 bp, Hepatitis C virus
ccaccagctttaccggcctg

SEQ ID NO: 51291 - DNA, 20 bp, Hepatitis C virus
accggcctgggcacggcctg

SEQ ID NO: 51292 - DNA, 20 bp, Hepatitis C virus
ccggcctgggcacggcctga

SEQ ID NO: 51293 - DNA, 20 bp, Hepatitis C virus
caacccaccgcttgtggaat

SEQ ID NO: 51294 - DNA, 20 bp, Hepatitis C virus
tccacgattccacaagcggt

SEQ ID NO: 51295 - DNA, 20 bp, Hepatitis C virus
cggagacaggttccatctct

SEQ ID NO: 51296 - DNA, 20 bp, Hepatitis C virus
ggagacaggttccatctctt

SEQ ID NO: 51297 - DNA, 20 bp, Hepatitis C virus
catctcttccatgccccccc

SEQ ID NO: 51298 - DNA, 20 bp, Hepatitis C virus
catgccccccctcgaggggg

SEQ ID NO: 51299 - DNA, 20 bp, Hepatitis C virus
gagatccagacctggagcct

SEQ ID NO: 51300 - DNA, 20 bp, Hepatitis C virus
aaggacattaagctagcggc

SEQ ID NO: 51301 - DNA, 20 bp, Hepatitis C virus
agctagcggcctccaaggtc

SEQ ID NO: 51302 - DNA, 20 bp, Hepatitis C virus
actggcaagcctcctccatg

SEQ ID NO: 51303 - DNA, 20 bp, Hepatitis C virus
cggtgaccttggaggccgct

SEQ ID NO: 51304 - DNA, 20 bp, Hepatitis C virus
gaggccgctagcttaatgtc

SEQ ID NO: 51305 - DNA, 20 bp, Hepatitis C virus
atgacattacacaaaaactt

SEQ ID NO: 51306 - DNA, 20 bp, Hepatitis C virus
tgacattacacaaaaacttc

SEQ ID NO: 51307 - DNA, 20 bp, Hepatitis C virus
cacaaaaacttcctcaggcg

SEQ ID NO: 51308 - DNA, 20 bp, Hepatitis C virus
ctcaggcggtgatgggggct

SEQ ID NO: 51309 - DNA, 20 bp, Hepatitis C virus
ttatggattccagtattccc

SEQ ID NO: 51310 - DNA, 20 bp, Hepatitis C virus
gcggcttgtaaagctgcagg

SEQ ID NO: 51311 - DNA, 20 bp, Hepatitis C virus
taaagctgcagggataatcg

SEQ ID NO: 51312 - DNA, 20 bp, Hepatitis C virus
tgggcgcgattatccctgca

SEQ ID NO: 51313 - DNA, 20 bp, Hepatitis C virus
tccctgcagctttacaagcc

SEQ ID NO: 51314 - DNA, 20 bp, Hepatitis C virus
acaagccgctaaggctttca

SEQ ID NO: 51315 - DNA, 20 bp, Hepatitis C virus
gacactcccctgtcaattca

SEQ ID NO: 51316 - DNA, 20 bp, Hepatitis C virus
acaggggagtgtctaactgt

SEQ ID NO: 51317 - DNA, 20 bp, Hepatitis C virus
cccaggcagcccgggcgatt

SEQ ID NO: 51318 - DNA, 20 bp, Hepatitis C virus
ccaggcagcccgggcgattg

SEQ ID NO: 51319 - DNA, 20 bp, Hepatitis C virus
gagtggtagggtctctggtc

SEQ ID NO: 51320 - DNA, 20 bp, Hepatitis C virus
agccctcagaaaacttgggg

SEQ ID NO: 51321 - DNA, 20 bp, Hepatitis C virus
gggcgccacccctcagagcg

SEQ ID NO: 51322 - DNA, 20 bp, Hepatitis C virus
cacgctctgaggggtggcgc

SEQ ID NO: 51323 - DNA, 20 bp, Hepatitis C virus
tctgagggctgaagccaccc

SEQ ID NO: 51324 - DNA, 20 bp, Hepatitis C virus
ctgagggctgaagccacccg

SEQ ID NO: 51325 - DNA, 20 bp, Neisseria gonorrhoeae
cgccttgtggcgaccgacgg

SEQ ID NO: 51326 - DNA, 20 bp, Neisseria gonorrhoeae
tggcgaccgacggacaccgc

SEQ ID NO: 51327 - DNA, 20 bp, Neisseria gonorrhoeae
cctatgcagcctgcgcgatt

SEQ ID NO: 51328 - DNA, 20 bp, Neisseria gonorrhoeae
atgcggatttgccgcgcgcc

SEQ ID NO: 51329 - DNA, 20 bp, Neisseria gonorrhoeae
gccgcgcgccgaagtgattt

SEQ ID NO: 51330 - DNA, 20 bp, Neisseria gonorrhoeae
gtggtagttgcccgtgccga

SEQ ID NO: 51331 - DNA, 20 bp, Neisseria gonorrhoeae
cccgtgccgaggtgggcgta

SEQ ID NO: 51332 - DNA, 20 bp, Neisseria gonorrhoeae
agcacgccgtcttcgcggcg

SEQ ID NO: 51333 - DNA, 20 bp, Neisseria gonorrhoeae
gcggcggatgaccagtgcca

SEQ ID NO: 51334 - DNA, 20 bp, Neisseria gonorrhoeae
cgcccacctcggcacgggca

SEQ ID NO: 51335 - DNA, 20 bp, Neisseria gonorrhoeae
gacgttcatgcccgggaaga

SEQ ID NO: 51336 - DNA, 20 bp, Neisseria gonorrhoeae
acgttcatgcccgggaagag

SEQ ID NO: 51337 - DNA, 20 bp, Neisseria gonorrhoeae
atgcccgggaagagtttgcc

SEQ ID NO: 51338 - DNA, 20 bp, Neisseria gonorrhoeae
gccgacgtgggcgtggagga

SEQ ID NO: 51339 - DNA, 20 bp, Neisseria gonorrhoeae
ccgacgtgggcgtggaggat

SEQ ID NO: 51340 - DNA, 20 bp, Neisseria gonorrhoeae
ggtcataaggttctcccaaa

SEQ ID NO: 51341 - DNA, 20 bp, Neisseria gonorrhoeae
tcccaaagatggttgttgtt

SEQ ID NO: 51342 - DNA, 20 bp, Neisseria gonorrhoeae
ttgttcggtcggagcgggcg

SEQ ID NO: 51343 - DNA, 20 bp, Neisseria gonorrhoeae
ttcggtcggagcgggcggac

SEQ ID NO: 51344 - DNA, 20 bp, Neisseria gonorrhoeae
ggtcggagcgggcggacaat

SEQ ID NO: 51345 - DNA, 20 bp, Neisseria gonorrhoeae
aaaccgatgacttcgccgcc

SEQ ID NO: 51346 - DNA, 20 bp, Neisseria gonorrhoeae
gccgccgtaaccgggcttgt

SEQ ID NO: 51347 - DNA, 20 bp, Neisseria gonorrhoeae
tcggtactgttcagcgtcag

SEQ ID NO: 51348 - DNA, 20 bp, Neisseria gonorrhoeae
agcgtcagtccgaacgtccc

SEQ ID NO: 51349 - DNA, 20 bp, Neisseria gonorrhoeae
ggtgtggcagtgccgatgag

SEQ ID NO: 51350 - DNA, 20 bp, Neisseria gonorrhoeae
gatgccgttgccgccaagct

SEQ ID NO: 51351 - DNA, 20 bp, Neisseria gonorrhoeae
atgccgttgccgccaagctg

SEQ ID NO: 51352 - DNA, 20 bp, Neisseria gonorrhoeae
ccgccaagctgcaaagccaa

SEQ ID NO: 51353 - DNA, 20 bp, Neisseria gonorrhoeae
gcgcgaaatgccccagtcgc

SEQ ID NO: 51354 - DNA, 20 bp, Neisseria gonorrhoeae
ggttttcggttcgcccgcac

SEQ ID NO: 51355 - DNA, 20 bp, Neisseria gonorrhoeae
gatgccgccgatgtattggt

SEQ ID NO: 51356 - DNA, 20 bp, Neisseria gonorrhoeae
gtcgaccgcgccccagtatt

SEQ ID NO: 51357 - DNA, 20 bp, Neisseria gonorrhoeae
cgcggattctgccgatacca

SEQ ID NO: 51358 - DNA, 20 bp, Neisseria gonorrhoeae
gcggattctgccgataccat

SEQ ID NO: 51359 - DNA, 20 bp, Neisseria gonorrhoeae
tgccgataccatgccgtctg

SEQ ID NO: 51360 - DNA, 20 bp, Neisseria gonorrhoeae
aagtcaacggcaaactgcgc

SEQ ID NO: 51361 - DNA, 20 bp, Neisseria gonorrhoeae
gaggtcggctttggaggcgt

SEQ ID NO: 51362 - DNA, 20 bp, Neisseria gonorrhoeae
ggaggcgtcggcggcgacgg

SEQ ID NO: 51363 - DNA, 20 bp, Neisseria gonorrhoeae
gaggcgtcggcggcgacggt

SEQ ID NO: 51364 - DNA, 20 bp, Neisseria gonorrhoeae
tgccgcgcagtttgccgttg

SEQ ID NO: 51365 - DNA, 20 bp, Neisseria gonorrhoeae
ttgacgatggtcagcagctt

SEQ ID NO: 51366 - DNA, 20 bp, Neisseria gonorrhoeae
tgacgatggtcagcagcttc

SEQ ID NO: 51367 - DNA, 20 bp, Neisseria gonorrhoeae
gacgatggtcagcagcttca

SEQ ID NO: 51368 - DNA, 20 bp, Neisseria gonorrhoeae
acgatggtcagcagcttcaa

SEQ ID NO: 51369 - DNA, 20 bp, Neisseria gonorrhoeae
aacgccgcgccgctcggctt

SEQ ID NO: 51370 - DNA, 20 bp, Neisseria gonorrhoeae
gctttggctgtagcctgcct

SEQ ID NO: 51371 - DNA, 20 bp, Neisseria gonorrhoeae
ctttggctgtagcctgcctg

SEQ ID NO: 51372 - DNA, 20 bp, Neisseria gonorrhoeae
ggctgtagcctgcctgtatc

SEQ ID NO: 51373 - DNA, 20 bp, Neisseria gonorrhoeae
gctgtagcctgcctgtatct

SEQ ID NO: 51374 - DNA, 20 bp, Neisseria gonorrhoeae
gggcgtgatgcggccgccga

SEQ ID NO: 51375 - DNA, 20 bp, Neisseria gonorrhoeae
ccggtcaatgacatgctggc

SEQ ID NO: 51376 - DNA, 20 bp, Neisseria gonorrhoeae
ccatcgaccacagcactgcc

SEQ ID NO: 51377 - DNA, 20 bp, Neisseria gonorrhoeae
catcgaccacagcactgccg

SEQ ID NO: 51378 - DNA, 20 bp, Neisseria gonorrhoeae
ccggttattggcacgccgat

SEQ ID NO: 51379 - DNA, 20 bp, Neisseria gonorrhoeae
ttggcacgccgatccgcgca

SEQ ID NO: 51380 - DNA, 20 bp, Neisseria gonorrhoeae
cgcgcagggtcatgggcagc

SEQ ID NO: 51381 - DNA, 20 bp, Neisseria gonorrhoeae
gcgcagggtcatgggcagcc

SEQ ID NO: 51382 - DNA, 20 bp, Neisseria gonorrhoeae
caacgacggctacaccgttt

SEQ ID NO: 51383 - DNA, 20 bp, Neisseria gonorrhoeae
ccggcacgcacaccccgttc

SEQ ID NO: 51384 - DNA, 20 bp, Neisseria gonorrhoeae
cggcacgcacaccccgttcg

SEQ ID NO: 51385 - DNA, 20 bp, Neisseria gonorrhoeae
aactgttccgccgcctgtat

SEQ ID NO: 51386 - DNA, 20 bp, Neisseria gonorrhoeae
cgccgcctgtatcaactgcc

SEQ ID NO: 51387 - DNA, 20 bp, Neisseria gonorrhoeae
gcggcaggcatgacgatgat

SEQ ID NO: 51388 - DNA, 20 bp, Neisseria gonorrhoeae
tcgcgggcggcgcgcggcag

SEQ ID NO: 51389 - DNA, 20 bp, Neisseria gonorrhoeae
atacaggcggcggaacagtt

SEQ ID NO: 51390 - DNA, 20 bp, Neisseria gonorrhoeae
cctgtaaccgacagcaccag

SEQ ID NO: 51391 - DNA, 20 bp, Neisseria gonorrhoeae
gcctttggcggcttcgcgct

SEQ ID NO: 51392 - DNA, 20 bp, Neisseria gonorrhoeae
cctttggcggcttcgcgctt

SEQ ID NO: 51393 - DNA, 20 bp, Neisseria gonorrhoeae
ggcggcttcgcgcttttggg

SEQ ID NO: 51394 - DNA, 20 bp, Neisseria gonorrhoeae
gcggcttcgcgcttttgggc

SEQ ID NO: 51395 - DNA, 20 bp, Neisseria gonorrhoeae
ttcgtcatggtatcggggca

SEQ ID NO: 51396 - DNA, 20 bp, Neisseria gonorrhoeae
gtcatggtatcggggcagaa

SEQ ID NO: 51397 - DNA, 20 bp, Neisseria gonorrhoeae
caaatgggcggcagggaata

SEQ ID NO: 51398 - DNA, 20 bp, Neisseria gonorrhoeae
cgccggcagacgggcggtat

SEQ ID NO: 51399 - DNA, 20 bp, Neisseria gonorrhoeae
gccggcagacgggcggtatt

SEQ ID NO: 51400 - DNA, 20 bp, Neisseria gonorrhoeae
gcggttcgcgcacgaaggcg

SEQ ID NO: 51401 - DNA, 20 bp, Neisseria gonorrhoeae
cggttcgcgcacgaaggcgg

SEQ ID NO: 51402 - DNA, 20 bp, Neisseria gonorrhoeae
gcgcacgaaggcggcggcgg

SEQ ID NO: 51403 - DNA, 20 bp, Neisseria gonorrhoeae
ctgccgccctgcaagccgat

SEQ ID NO: 51404 - DNA, 20 bp, Neisseria gonorrhoeae
gggcgaactcatgccgcgtt

SEQ ID NO: 51405 - DNA, 20 bp, Neisseria gonorrhoeae
gtcggtcatttccaacgcgc

SEQ ID NO: 51406 - DNA, 20 bp, Neisseria gonorrhoeae
ccaacgcgccggagggcagg

SEQ ID NO: 51407 - DNA, 20 bp, Neisseria gonorrhoeae
caacgcgccggagggcaggt

SEQ ID NO: 51408 - DNA, 20 bp, Neisseria gonorrhoeae
ctgccatttgctgtcggcaa

SEQ ID NO: 51409 - DNA, 20 bp, Neisseria gonorrhoeae
gctgtcggcaaaccgccacg

SEQ ID NO: 51410 - DNA, 20 bp, Neisseria gonorrhoeae
atcgggcgcaaacaaaagct

SEQ ID NO: 51411 - DNA, 20 bp, Neisseria gonorrhoeae
gccccgattcagtttcaccg

SEQ ID NO: 51412 - DNA, 20 bp, Neisseria gonorrhoeae
agtttcaccgccaccaacgc

SEQ ID NO: 51413 - DNA, 20 bp, Neisseria gonorrhoeae
caccgccaccaacgcgccac

SEQ ID NO: 51414 - DNA, 20 bp, Neisseria gonorrhoeae
accgccaccaacgcgccact

SEQ ID NO: 51415 - DNA, 20 bp, Neisseria gonorrhoeae
caccagccacacttcgcgcg

SEQ ID NO: 51416 - DNA, 20 bp, Neisseria gonorrhoeae
gcgcggatagcccgattcgg

SEQ ID NO: 51417 - DNA, 20 bp, Neisseria gonorrhoeae
ggtcaactggcgttcgtccc

SEQ ID NO: 51418 - DNA, 20 bp, Neisseria gonorrhoeae
gtcccaagccggacacaccc

SEQ ID NO: 51419 - DNA, 20 bp, Neisseria gonorrhoeae
ggacgaacgccagttgaccg

SEQ ID NO: 51420 - DNA, 20 bp, Neisseria gonorrhoeae
cgtccgttgctgcggtagtc

SEQ ID NO: 51421 - DNA, 20 bp, Neisseria gonorrhoeae
gtccgttgctgcggtagtct

SEQ ID NO: 51422 - DNA, 20 bp, Neisseria gonorrhoeae
ctgcggtagtctttgcgccg

SEQ ID NO: 51423 - DNA, 20 bp, Neisseria gonorrhoeae
gcgccgcgtttcgggcaact

SEQ ID NO: 51424 - DNA, 20 bp, Neisseria gonorrhoeae
cgccgcgtttcgggcaactc

SEQ ID NO: 51425 - DNA, 20 bp, Neisseria gonorrhoeae
cgcggcggcgaggcggtcga

SEQ ID NO: 51426 - DNA, 20 bp, Neisseria gonorrhoeae
ctcgaccgcctcgccgccgc

SEQ ID NO: 51427 - DNA, 20 bp, Neisseria gonorrhoeae
gaggatgttgtcgagcagga

SEQ ID NO: 51428 - DNA, 20 bp, Neisseria gonorrhoeae
aggatgttgtcgagcaggat

SEQ ID NO: 51429 - DNA, 20 bp, Neisseria gonorrhoeae
tcgagcaggatgcccgcttt

SEQ ID NO: 51430 - DNA, 20 bp, Neisseria gonorrhoeae
gccgtggaacagttgcccgt

SEQ ID NO: 51431 - DNA, 20 bp, Neisseria gonorrhoeae
ccgtggaacagttgcccgta

SEQ ID NO: 51432 - DNA, 20 bp, Neisseria gonorrhoeae
cagccacatcggacccaagc

SEQ ID NO: 51433 - DNA, 20 bp, Neisseria gonorrhoeae
agccacatcggacccaagcc

SEQ ID NO: 51434 - DNA, 20 bp, Neisseria gonorrhoeae
acatattttctccattaaga

SEQ ID NO: 51435 - DNA, 20 bp, Neisseria gonorrhoeae
atggagaaaatatgttaagc

SEQ ID NO: 51436 - DNA, 20 bp, Neisseria gonorrhoeae
agcgcgcgctacctccacct

SEQ ID NO: 51437 - DNA, 20 bp, Neisseria gonorrhoeae
cgcctgttctttggcagtca

SEQ ID NO: 51438 - DNA, 20 bp, Neisseria gonorrhoeae
tttggcagtcagggcgattt

SEQ ID NO: 51439 - DNA, 20 bp, Neisseria gonorrhoeae
ggcagtcagggcgattttgt

SEQ ID NO: 51440 - DNA, 20 bp, Neisseria gonorrhoeae
gcagtcagggcgattttgtt

SEQ ID NO: 51441 - DNA, 20 bp, Neisseria gonorrhoeae
tgttgcggacgtagagcagt

SEQ ID NO: 51442 - DNA, 20 bp, Neisseria gonorrhoeae
ataatcgctcaaacggcggc

SEQ ID NO: 51443 - DNA, 20 bp, Neisseria gonorrhoeae
gacacgctgaaccgccgccg

SEQ ID NO: 51444 - DNA, 20 bp, Neisseria gonorrhoeae
gagcgattatcaagtcggta

SEQ ID NO: 51445 - DNA, 20 bp, Neisseria gonorrhoeae
agcgattatcaagtcggtag

SEQ ID NO: 51446 - DNA, 20 bp, Neisseria gonorrhoeae
tcaagtcggtagggcggcag

SEQ ID NO: 51447 - DNA, 20 bp, Neisseria gonorrhoeae
ctcttcgccgccgtagcgcg

SEQ ID NO: 51448 - DNA, 20 bp, Neisseria gonorrhoeae
tcttcgccgccgtagcgcgt

SEQ ID NO: 51449 - DNA, 20 bp, Neisseria gonorrhoeae
gccgccgtagcgcgtgtcgc

SEQ ID NO: 51450 - DNA, 20 bp, Neisseria gonorrhoeae
tgggcgacacgcgctacggc

SEQ ID NO: 51451 - DNA, 20 bp, Neisseria gonorrhoeae
gggcgacacgcgctacggcg

SEQ ID NO: 51452 - DNA, 20 bp, Neisseria gonorrhoeae
accggcaggaacggcacgcg

SEQ ID NO: 51453 - DNA, 20 bp, Neisseria gonorrhoeae
ccggcaggaacggcacgcgc

SEQ ID NO: 51454 - DNA, 20 bp, Neisseria gonorrhoeae
cgccgcccacgattcgaggc

SEQ ID NO: 51455 - DNA, 20 bp, Neisseria gonorrhoeae
gaggcgtttttggatttggc

SEQ ID NO: 51456 - DNA, 20 bp, Neisseria gonorrhoeae
ttggatttggcgttggctca

SEQ ID NO: 51457 - DNA, 20 bp, Neisseria gonorrhoeae
gtcgttcggcgcgcccaccg

SEQ ID NO: 51458 - DNA, 20 bp, Neisseria gonorrhoeae
tcgttcggcgcgcccaccga

SEQ ID NO: 51459 - DNA, 20 bp, Neisseria gonorrhoeae
ggcgcgcccaccgaaggcga

SEQ ID NO: 51460 - DNA, 20 bp, Neisseria gonorrhoeae
ccgaacaaattgccgaaatt

SEQ ID NO: 51461 - DNA, 20 bp, Neisseria gonorrhoeae
ccgaaattatgccgtctgtc

SEQ ID NO: 51462 - DNA, 20 bp, Neisseria gonorrhoeae
gttttgcgtgccggcgcagg

SEQ ID NO: 51463 - DNA, 20 bp, Neisseria gonorrhoeae
tgcgtgccggcgcaggcatc

SEQ ID NO: 51464 - DNA, 20 bp, Neisseria gonorrhoeae
gcgtgccggcgcaggcatct

SEQ ID NO: 51465 - DNA, 20 bp, Neisseria gonorrhoeae
cgtgccggcgcaggcatctt

SEQ ID NO: 51466 - DNA, 20 bp, Neisseria gonorrhoeae
gatggcggcggagagtgcac

SEQ ID NO: 51467 - DNA, 20 bp, Neisseria gonorrhoeae
ggcggagactttgtcgccca

SEQ ID NO: 51468 - DNA, 20 bp, Neisseria gonorrhoeae
gcggagactttgtcgcccat

SEQ ID NO: 51469 - DNA, 20 bp, Neisseria gonorrhoeae
gtcgcccatcaggcggatgg

SEQ ID NO: 51470 - DNA, 20 bp, Neisseria gonorrhoeae
tcgcccatcaggcggatggt

SEQ ID NO: 51471 - DNA, 20 bp, Neisseria gonorrhoeae
cgggccgatgaaggtaaagc

SEQ ID NO: 51472 - DNA, 20 bp, Neisseria gonorrhoeae
agataactttgcgcagaagc

SEQ ID NO: 51473 - DNA, 20 bp, Neisseria gonorrhoeae
gcgcagaagcggcaggaccg

SEQ ID NO: 51474 - DNA, 20 bp, Neisseria gonorrhoeae
cgcagaagcggcaggaccga

SEQ ID NO: 51475 - DNA, 20 bp, Neisseria gonorrhoeae
gtcggcgagtttgacgtgca

SEQ ID NO: 51476 - DNA, 20 bp, Neisseria gonorrhoeae
gacgtgcaggctgcctttgt

SEQ ID NO: 51477 - DNA, 20 bp, Neisseria gonorrhoeae
ggcgagcggcacgccggtgg

SEQ ID NO: 51478 - DNA, 20 bp, Neisseria gonorrhoeae
gcgagcggcacgccggtggc

SEQ ID NO: 51479 - DNA, 20 bp, Neisseria gonorrhoeae
ggagacaaaggggacggtac

SEQ ID NO: 51480 - DNA, 20 bp, Neisseria gonorrhoeae
gagacaaaggggacggtacg

SEQ ID NO: 51481 - DNA, 20 bp, Neisseria gonorrhoeae
gtctccaaagccaccggcgt

SEQ ID NO: 51482 - DNA, 20 bp, Neisseria gonorrhoeae
tcggtgcggacgatttccaa

SEQ ID NO: 51483 - DNA, 20 bp, Neisseria gonorrhoeae
cggtgcggacgatttccaac

SEQ ID NO: 51484 - DNA, 20 bp, Neisseria gonorrhoeae
ggtgcggacgatttccaaca

SEQ ID NO: 51485 - DNA, 20 bp, Neisseria gonorrhoeae
ccaacacgtcttccaatgtc

SEQ ID NO: 51486 - DNA, 20 bp, Neisseria gonorrhoeae
caacacgtcttccaatgtca

SEQ ID NO: 51487 - DNA, 20 bp, Neisseria gonorrhoeae
cgcgcctttttcgcgcaaca

SEQ ID NO: 51488 - DNA, 20 bp, Neisseria gonorrhoeae
ttcgcgcaacagcatggtca

SEQ ID NO: 51489 - DNA, 20 bp, Neisseria gonorrhoeae
tcgcgcaacagcatggtcag

SEQ ID NO: 51490 - DNA, 20 bp, Neisseria gonorrhoeae
cgcgcaacagcatggtcagg

SEQ ID NO: 51491 - DNA, 20 bp, Neisseria gonorrhoeae
gcgcaacagcatggtcaggc

SEQ ID NO: 51492 - DNA, 20 bp, Neisseria gonorrhoeae
cgggcatcagggtttcttgt

SEQ ID NO: 51493 - DNA, 20 bp, Neisseria gonorrhoeae
gggcatcagggtttcttgta

SEQ ID NO: 51494 - DNA, 20 bp, Neisseria gonorrhoeae
cttgtacggcatcggcgagg

SEQ ID NO: 51495 - DNA, 20 bp, Neisseria gonorrhoeae
ttgtacggcatcggcgaggg

SEQ ID NO: 51496 - DNA, 20 bp, Neisseria gonorrhoeae
tacggcatcggcgagggcgg

SEQ ID NO: 51497 - DNA, 20 bp, Neisseria gonorrhoeae
gtcgacgggcgcgacttgcg

SEQ ID NO: 51498 - DNA, 20 bp, Neisseria gonorrhoeae
tcgacgggcgcgacttgcgg

SEQ ID NO: 51499 - DNA, 20 bp, Neisseria gonorrhoeae
cggggcgttgcccagttgca

SEQ ID NO: 51500 - DNA, 20 bp, Neisseria gonorrhoeae
cccagttgcagggctttgaa

SEQ ID NO: 51501 - DNA, 20 bp, Neisseria gonorrhoeae
cagggctttgaagtaggcga

SEQ ID NO: 51502 - DNA, 20 bp, Neisseria gonorrhoeae
ctttatgccttccgcgctcg

SEQ ID NO: 51503 - DNA, 20 bp, Neisseria gonorrhoeae
atgccttccgcgctcgataa

SEQ ID NO: 51504 - DNA, 20 bp, Neisseria gonorrhoeae
tgccttccgcgctcgataaa

SEQ ID NO: 51505 - DNA, 20 bp, Neisseria gonorrhoeae
cgcgctcgataaatattacc

SEQ ID NO: 51506 - DNA, 20 bp, Neisseria gonorrhoeae
cctgccccacctgcgcgcct

SEQ ID NO: 51507 - DNA, 20 bp, Neisseria gonorrhoeae
tggcgatgcgctggggcagc

SEQ ID NO: 51508 - DNA, 20 bp, Neisseria gonorrhoeae
ggcgatgcgctggggcagcc

SEQ ID NO: 51509 - DNA, 20 bp, Neisseria gonorrhoeae
gcgatgcgctggggcagcca

SEQ ID NO: 51510 - DNA, 20 bp, Neisseria gonorrhoeae
cctacgatgccggttttttc

SEQ ID NO: 51511 - DNA, 20 bp, Neisseria gonorrhoeae
ttggaaaaaaccggcatcgt

SEQ ID NO: 51512 - DNA, 20 bp, Neisseria gonorrhoeae
cactggtgggcggcgcgacc

SEQ ID NO: 51513 - DNA, 20 bp, Neisseria gonorrhoeae
aaagccgccgaacgcagctt

SEQ ID NO: 51514 - DNA, 20 bp, Neisseria gonorrhoeae
aattccgccgaaaccgttgc

SEQ ID NO: 51515 - DNA, 20 bp, Neisseria gonorrhoeae
cggcggaattcaagctgcgt

SEQ ID NO: 51516 - DNA, 20 bp, Neisseria gonorrhoeae
ggcggaattcaagctgcgtt

SEQ ID NO: 51517 - DNA, 20 bp, Neisseria gonorrhoeae
gccgagttgaacaaacgcca

SEQ ID NO: 51518 - DNA, 20 bp, Neisseria gonorrhoeae
aacaaacgccacggcgcggt

SEQ ID NO: 51519 - DNA, 20 bp, Neisseria gonorrhoeae
tggaaatcggcggttccgac

SEQ ID NO: 51520 - DNA, 20 bp, Neisseria gonorrhoeae
ggaaatcggcggttccgacc

SEQ ID NO: 51521 - DNA, 20 bp, Neisseria gonorrhoeae
gaaatcggcggttccgacca

SEQ ID NO: 51522 - DNA, 20 bp, Neisseria gonorrhoeae
ttcgcactccgtaccggcaa

SEQ ID NO: 51523 - DNA, 20 bp, Neisseria gonorrhoeae
tcgcactccgtaccggcaaa

SEQ ID NO: 51524 - DNA, 20 bp, Neisseria gonorrhoeae
cgcactccgtaccggcaaaa

SEQ ID NO: 51525 - DNA, 20 bp, Neisseria gonorrhoeae
gcactccgtaccggcaaaac

SEQ ID NO: 51526 - DNA, 20 bp, Neisseria gonorrhoeae
ctggaagggacgggttgcgt

SEQ ID NO: 51527 - DNA, 20 bp, Neisseria gonorrhoeae
accgagcgacaggtcagtgg

SEQ ID NO: 51528 - DNA, 20 bp, Neisseria gonorrhoeae
ccgagcgacaggtcagtggt

SEQ ID NO: 51529 - DNA, 20 bp, Neisseria gonorrhoeae
gtcggcatggacaaagccgg

SEQ ID NO: 51530 - DNA, 20 bp, Neisseria gonorrhoeae
tcggcatggacaaagccggc

SEQ ID NO: 51531 - DNA, 20 bp, Neisseria gonorrhoeae
taccgtcgctgccggctttg

SEQ ID NO: 51532 - DNA, 20 bp, Neisseria gonorrhoeae
gcgcgccgacaaaaccgtcg

SEQ ID NO: 51533 - DNA, 20 bp, Neisseria gonorrhoeae
cgcgccgacaaaaccgtcgg

SEQ ID NO: 51534 - DNA, 20 bp, Neisseria gonorrhoeae
tgtcggcgcgcaaaggctcg

SEQ ID NO: 51535 - DNA, 20 bp, Neisseria gonorrhoeae
gtcggcgcgcaaaggctcga

SEQ ID NO: 51536 - DNA, 20 bp, Neisseria gonorrhoeae
tcggcgcgcaaaggctcgat

SEQ ID NO: 51537 - DNA, 20 bp, Neisseria gonorrhoeae
caaacgcagggaagaacgcg

SEQ ID NO: 51538 - DNA, 20 bp, Neisseria gonorrhoeae
gttcggcctgccctgccatg

SEQ ID NO: 51539 - DNA, 20 bp, Neisseria gonorrhoeae
ttcggcctgccctgccatgt

SEQ ID NO: 51540 - DNA, 20 bp, Neisseria gonorrhoeae
ggcctgccctgccatgtcgc

SEQ ID NO: 51541 - DNA, 20 bp, Neisseria gonorrhoeae
ttccctgcgtttgcaaccgc

SEQ ID NO: 51542 - DNA, 20 bp, Neisseria gonorrhoeae
tccagcgtttgtccgccgac

SEQ ID NO: 51543 - DNA, 20 bp, Neisseria gonorrhoeae
ccagcgtttgtccgccgacc

SEQ ID NO: 51544 - DNA, 20 bp, Neisseria gonorrhoeae
cagcgtttgtccgccgacca

SEQ ID NO: 51545 - DNA, 20 bp, Neisseria gonorrhoeae
gtccgccgaccatgatttca

SEQ ID NO: 51546 - DNA, 20 bp, Neisseria gonorrhoeae
tccgccgaccatgatttcag

SEQ ID NO: 51547 - DNA, 20 bp, Neisseria gonorrhoeae
gtcggcgttgtccatggcaa

SEQ ID NO: 51548 - DNA, 20 bp, Neisseria gonorrhoeae
tccatggcaaggtcgatgtt

SEQ ID NO: 51549 - DNA, 20 bp, Neisseria gonorrhoeae
gccaagagcatggcgcggtt

SEQ ID NO: 51550 - DNA, 20 bp, Neisseria gonorrhoeae
ggttcgatgctgtcgaacgc

SEQ ID NO: 51551 - DNA, 20 bp, Neisseria gonorrhoeae
gatgctgtcgaacgcgccgc

SEQ ID NO: 51552 - DNA, 20 bp, Neisseria gonorrhoeae
cacgtcgcccttgtcgtaca

SEQ ID NO: 51553 - DNA, 20 bp, Neisseria gonorrhoeae
tcgtacatggatacgggcga

SEQ ID NO: 51554 - DNA, 20 bp, Neisseria gonorrhoeae
gtccgcctgatacacggggc

SEQ ID NO: 51555 - DNA, 20 bp, Neisseria gonorrhoeae
cgccgggcaagatttccgat

SEQ ID NO: 51556 - DNA, 20 bp, Neisseria gonorrhoeae
ccgattacagccccgtgtat

SEQ ID NO: 51557 - DNA, 20 bp, Neisseria gonorrhoeae
tggacgaacccgtccgcccc

SEQ ID NO: 51558 - DNA, 20 bp, Neisseria gonorrhoeae
ggacgaacccgtccgccccg

SEQ ID NO: 51559 - DNA, 20 bp, Neisseria gonorrhoeae
gacgaacccgtccgccccga

SEQ ID NO: 51560 - DNA, 20 bp, Neisseria gonorrhoeae
agacgatttactgggcggac

SEQ ID NO: 51561 - DNA, 20 bp, Neisseria gonorrhoeae
actgggcggacaaggcacgc

SEQ ID NO: 51562 - DNA, 20 bp, Neisseria gonorrhoeae
cgtaggcgttgtcgataatc

SEQ ID NO: 51563 - DNA, 20 bp, Neisseria gonorrhoeae
tcgataatcggcggaatgcc

SEQ ID NO: 51564 - DNA, 20 bp, Neisseria gonorrhoeae
acgcgccaaagcgtccaaac

SEQ ID NO: 51565 - DNA, 20 bp, Neisseria gonorrhoeae
cgccgtcggtcaacacgttg

SEQ ID NO: 51566 - DNA, 20 bp, Neisseria gonorrhoeae
gccgtcggtcaacacgttgc

SEQ ID NO: 51567 - DNA, 20 bp, Neisseria gonorrhoeae
gtgccacggcagcatggtct

SEQ ID NO: 51568 - DNA, 20 bp, Neisseria gonorrhoeae
gacggcgtttttcagccgct

SEQ ID NO: 51569 - DNA, 20 bp, Neisseria gonorrhoeae
ttcagccgctctttgggccg

SEQ ID NO: 51570 - DNA, 20 bp, Neisseria gonorrhoeae
tcagccgctctttgggccgc

SEQ ID NO: 51571 - DNA, 20 bp, Neisseria gonorrhoeae
cagccgctctttgggccgcc

SEQ ID NO: 51572 - DNA, 20 bp, Neisseria gonorrhoeae
agccgctctttgggccgcca

SEQ ID NO: 51573 - DNA, 20 bp, Neisseria gonorrhoeae
tcgggtgaagctcggccatg

SEQ ID NO: 51574 - DNA, 20 bp, Neisseria gonorrhoeae
agcatggtgtttggtccgtc

SEQ ID NO: 51575 - DNA, 20 bp, Neisseria gonorrhoeae
ggtccgtcgggttcggacgg

SEQ ID NO: 51576 - DNA, 20 bp, Neisseria gonorrhoeae
gtccgtcgggttcggacggc

SEQ ID NO: 51577 - DNA, 20 bp, Neisseria gonorrhoeae
ggacggcatttccgacccta

SEQ ID NO: 51578 - DNA, 20 bp, Neisseria gonorrhoeae
gagcggctgccacaggcggc

SEQ ID NO: 51579 - DNA, 20 bp, Neisseria gonorrhoeae
agcggctgccacaggcggca

SEQ ID NO: 51580 - DNA, 20 bp, Neisseria gonorrhoeae
ctgtcttgaaaacaaaaaac

SEQ ID NO: 51581 - DNA, 20 bp, Neisseria gonorrhoeae
tgtcttgaaaacaaaaaaca

SEQ ID NO: 51582 - DNA, 20 bp, Neisseria gonorrhoeae
aaaacaaaaaacaaccagaa

SEQ ID NO: 51583 - DNA, 20 bp, Neisseria gonorrhoeae
cggacgacgttcaaaccgat

SEQ ID NO: 51584 - DNA, 20 bp, Neisseria gonorrhoeae
aaaccgatgccgctgatttc

SEQ ID NO: 51585 - DNA, 20 bp, Neisseria gonorrhoeae
cggtcagcgtgtaaaacagc

SEQ ID NO: 51586 - DNA, 20 bp, Neisseria gonorrhoeae
ggtcagcgtgtaaaacagcg

SEQ ID NO: 51587 - DNA, 20 bp, Neisseria gonorrhoeae
accgtcgtatcgtgcatgtt

SEQ ID NO: 51588 - DNA, 20 bp, Neisseria gonorrhoeae
gccggaaagtgcagcagccc

SEQ ID NO: 51589 - DNA, 20 bp, Neisseria gonorrhoeae
tgctgctgttgccgctgacg

SEQ ID NO: 51590 - DNA, 20 bp, Neisseria gonorrhoeae
ccgctgacggtcgggctgct

SEQ ID NO: 51591 - DNA, 20 bp, Neisseria gonorrhoeae
ccggcgaacacctccgtcct

SEQ ID NO: 51592 - DNA, 20 bp, Neisseria gonorrhoeae
cggcgaacacctccgtcctg

SEQ ID NO: 51593 - DNA, 20 bp, Neisseria gonorrhoeae
tgcctcgggctggatcaggc

SEQ ID NO: 51594 - DNA, 20 bp, Neisseria gonorrhoeae
tctgccaacaccgtgccgat

SEQ ID NO: 51595 - DNA, 20 bp, Neisseria gonorrhoeae
cggcacgcaaaacctgtacg

SEQ ID NO: 51596 - DNA, 20 bp, Neisseria gonorrhoeae
ggcacgcaaaacctgtacgt

SEQ ID NO: 51597 - DNA, 20 bp, Neisseria gonorrhoeae
ccggcgaggaagcgcgtgcc

SEQ ID NO: 51598 - DNA, 20 bp, Neisseria gonorrhoeae
tgcgtgccgaaagctgcgcg

SEQ ID NO: 51599 - DNA, 20 bp, Neisseria gonorrhoeae
tcgggcggcggcggtcaggt

SEQ ID NO: 51600 - DNA, 20 bp, Neisseria gonorrhoeae
cgggcggcggcggtcaggtc

SEQ ID NO: 51601 - DNA, 20 bp, Neisseria gonorrhoeae
gggcggcggcggtcaggtcg

SEQ ID NO: 51602 - DNA, 20 bp, Neisseria gonorrhoeae
cggaggcgttgtgcattgaa

SEQ ID NO: 51603 - DNA, 20 bp, Neisseria gonorrhoeae
tgcattgaagggcgaacgtt

SEQ ID NO: 51604 - DNA, 20 bp, Neisseria gonorrhoeae
tccgatttaatctggtaggc

SEQ ID NO: 51605 - DNA, 20 bp, Neisseria gonorrhoeae
ccgatttaatctggtaggcg

SEQ ID NO: 51606 - DNA, 20 bp, Neisseria gonorrhoeae
cgatttaatctggtaggcgc

SEQ ID NO: 51607 - DNA, 20 bp, Neisseria gonorrhoeae
aatctggtaggcgcgcacga

SEQ ID NO: 51608 - DNA, 20 bp, Neisseria gonorrhoeae
atctggtaggcgcgcacgag

SEQ ID NO: 51609 - DNA, 20 bp, Neisseria gonorrhoeae
ccgcttcgacggcgtgtccg

SEQ ID NO: 51610 - DNA, 20 bp, Neisseria gonorrhoeae
cgcttcgacggcgtgtccga

SEQ ID NO: 51611 - DNA, 20 bp, Neisseria gonorrhoeae
gacggcgtgtccgaaggtgt

SEQ ID NO: 51612 - DNA, 20 bp, Neisseria gonorrhoeae
ggacacgccgtcgaagcgga

SEQ ID NO: 51613 - DNA, 20 bp, Neisseria gonorrhoeae
cggcgtatggctgcacggcg

SEQ ID NO: 51614 - DNA, 20 bp, Neisseria gonorrhoeae
gcctatatttcgggcgcggt

SEQ ID NO: 51615 - DNA, 20 bp, Neisseria gonorrhoeae
cgggcgcggttttggcaagc

SEQ ID NO: 51616 - DNA, 20 bp, Neisseria gonorrhoeae
gggcgcggttttggcaagcg

SEQ ID NO: 51617 - DNA, 20 bp, Neisseria gonorrhoeae
tggcaagcgtgaaaaatgtg

SEQ ID NO: 51618 - DNA, 20 bp, Neisseria gonorrhoeae
ggcaagcgtgaaaaatgtgc

SEQ ID NO: 51619 - DNA, 20 bp, Neisseria gonorrhoeae
gacaaaacggcgaaactgct

SEQ ID NO: 51620 - DNA, 20 bp, Neisseria gonorrhoeae
gccgtatccgggcggtgcga

SEQ ID NO: 51621 - DNA, 20 bp, Neisseria gonorrhoeae
ccgtatccgggcggtgcgaa

SEQ ID NO: 51622 - DNA, 20 bp, Neisseria gonorrhoeae
cgcaagttccgacagtttcg

SEQ ID NO: 51623 - DNA, 20 bp, Neisseria gonorrhoeae
cgacagtttcgcaccgcccg

SEQ ID NO: 51624 - DNA, 20 bp, Neisseria gonorrhoeae
tgtctatcgctttgattttc

SEQ ID NO: 51625 - DNA, 20 bp, Neisseria gonorrhoeae
gtctatcgctttgattttcg

SEQ ID NO: 51626 - DNA, 20 bp, Neisseria gonorrhoeae
tctatcgctttgattttcgg

SEQ ID NO: 51627 - DNA, 20 bp, Neisseria gonorrhoeae
gattttcggcggcttgtaca

SEQ ID NO: 51628 - DNA, 20 bp, Neisseria gonorrhoeae
attttcggcggcttgtacat

SEQ ID NO: 51629 - DNA, 20 bp, Neisseria gonorrhoeae
gggggcgtcataaacggcga

SEQ ID NO: 51630 - DNA, 20 bp, Neisseria gonorrhoeae
ggggcgtcataaacggcgaa

SEQ ID NO: 51631 - DNA, 20 bp, Neisseria gonorrhoeae
aaaatggtcgggactgccga

SEQ ID NO: 51632 - DNA, 20 bp, Neisseria gonorrhoeae
tgaagccgacagcggttcgc

SEQ ID NO: 51633 - DNA, 20 bp, Neisseria gonorrhoeae
gaagccgacagcggttcgcc

SEQ ID NO: 51634 - DNA, 20 bp, Neisseria gonorrhoeae
gcaggaagggcagggttcgc

SEQ ID NO: 51635 - DNA, 20 bp, Neisseria gonorrhoeae
gcagaggacttggtttaagt

SEQ ID NO: 51636 - DNA, 20 bp, Neisseria gonorrhoeae
gtttaagttttcgcgcgagc

SEQ ID NO: 51637 - DNA, 20 bp, Neisseria gonorrhoeae
aagttttcgcgcgagcgttt

SEQ ID NO: 51638 - DNA, 20 bp, Neisseria gonorrhoeae
agttttcgcgcgagcgtttg

SEQ ID NO: 51639 - DNA, 20 bp, Neisseria gonorrhoeae
tcggcgttggtgcggatgat

SEQ ID NO: 51640 - DNA, 20 bp, Neisseria gonorrhoeae
cggcgttggtgcggatgatg

SEQ ID NO: 51641 - DNA, 20 bp, Neisseria gonorrhoeae
ggcgttggtgcggatgatgt

SEQ ID NO: 51642 - DNA, 20 bp, Neisseria gonorrhoeae
gtgcggatgatgtagccccg

SEQ ID NO: 51643 - DNA, 20 bp, Neisseria gonorrhoeae
tccggcaggagcttgtcgag

SEQ ID NO: 51644 - DNA, 20 bp, Neisseria gonorrhoeae
gccgaaatgcagcggctttc

SEQ ID NO: 51645 - DNA, 20 bp, Neisseria gonorrhoeae
ccgaaatgcagcggctttcg

SEQ ID NO: 51646 - DNA, 20 bp, Neisseria gonorrhoeae
cgggacagcgcagcgtgccg

SEQ ID NO: 51647 - DNA, 20 bp, Neisseria gonorrhoeae
gggacagcgcagcgtgccgc

SEQ ID NO: 51648 - DNA, 20 bp, Neisseria gonorrhoeae
tcatcggcgaaacgcacgtc

SEQ ID NO: 51649 - DNA, 20 bp, Neisseria gonorrhoeae
ccgaaagcctgcgccttttg

SEQ ID NO: 51650 - DNA, 20 bp, Neisseria gonorrhoeae
tgcattcgccgccgccgagt

SEQ ID NO: 51651 - DNA, 20 bp, Neisseria gonorrhoeae
gcattcgccgccgccgagtt

SEQ ID NO: 51652 - DNA, 20 bp, Neisseria gonorrhoeae
cattcgccgccgccgagttt

SEQ ID NO: 51653 - DNA, 20 bp, Neisseria gonorrhoeae
gccgccgccgagtttcacta

SEQ ID NO: 51654 - DNA, 20 bp, Neisseria gonorrhoeae
gccgcaggccgtctgaacgt

SEQ ID NO: 51655 - DNA, 20 bp, Neisseria gonorrhoeae
ccgcaggccgtctgaacgtc

SEQ ID NO: 51656 - DNA, 20 bp, Neisseria gonorrhoeae
gttgccaccaccgtcatcga

SEQ ID NO: 51657 - DNA, 20 bp, Neisseria gonorrhoeae
ccaccaccgtcatcgaagtc

SEQ ID NO: 51658 - DNA, 20 bp, Neisseria gonorrhoeae
gatcaccatcagggcggcgt

SEQ ID NO: 51659 - DNA, 20 bp, Neisseria gonorrhoeae
caccttttggaacaagcgcg

SEQ ID NO: 51660 - DNA, 20 bp, Neisseria gonorrhoeae
tggaacaagcgcgcgaaacc

SEQ ID NO: 51661 - DNA, 20 bp, Neisseria gonorrhoeae
ggaacaagcgcgcgaaaccg

SEQ ID NO: 51662 - DNA, 20 bp, Neisseria gonorrhoeae
gaacaagcgcgcgaaaccgc

SEQ ID NO: 51663 - DNA, 20 bp, Neisseria gonorrhoeae
aacaaaaccctgaaatcgtc

SEQ ID NO: 51664 - DNA, 20 bp, Neisseria gonorrhoeae
gcgccgcgcacgctgcgggt

SEQ ID NO: 51665 - DNA, 20 bp, Neisseria gonorrhoeae
cgccgcgcacgctgcgggtt

SEQ ID NO: 51666 - DNA, 20 bp, Neisseria gonorrhoeae
cgggtgtcgaaccggcgggc

SEQ ID NO: 51667 - DNA, 20 bp, Neisseria gonorrhoeae
gggtgtcgaaccggcgggca

SEQ ID NO: 51668 - DNA, 20 bp, Neisseria gonorrhoeae
atggacatcctgcccgccgg

SEQ ID NO: 51669 - DNA, 20 bp, Neisseria gonorrhoeae
ggcgatgccgtcctgaagcc

SEQ ID NO: 51670 - DNA, 20 bp, Neisseria gonorrhoeae
cgggcaggtggcggtgtccg

SEQ ID NO: 51671 - DNA, 20 bp, Neisseria gonorrhoeae
gggcaggtggcggtgtccgg

SEQ ID NO: 51672 - DNA, 20 bp, Neisseria gonorrhoeae
aggacggcatcgccgaagga

SEQ ID NO: 51673 - DNA, 20 bp, Neisseria gonorrhoeae
gtgttcacgccgcacctcgc

SEQ ID NO: 51674 - DNA, 20 bp, Neisseria gonorrhoeae
ccaggtcggaatgtcccgta

SEQ ID NO: 51675 - DNA, 20 bp, Neisseria gonorrhoeae
tggaacagggcgtgcgcgtc

SEQ ID NO: 51676 - DNA, 20 bp, Neisseria gonorrhoeae
ggaacagggcgtgcgcgtca

SEQ ID NO: 51677 - DNA, 20 bp, Neisseria gonorrhoeae
gaacagggcgtgcgcgtcat

SEQ ID NO: 51678 - DNA, 20 bp, Neisseria gonorrhoeae
ccgccgacttccgcatacgg

SEQ ID NO: 51679 - DNA, 20 bp, Neisseria gonorrhoeae
ggaaggcgaggccgtacacg

SEQ ID NO: 51680 - DNA, 20 bp, Neisseria gonorrhoeae
gaaggcgaggccgtacacgc

SEQ ID NO: 51681 - DNA, 20 bp, Neisseria gonorrhoeae
gaaagtaatcggcaactgcg

SEQ ID NO: 51682 - DNA, 20 bp, Neisseria gonorrhoeae
ccgcttcgctgcggctggtt

SEQ ID NO: 51683 - DNA, 20 bp, Neisseria gonorrhoeae
gctgcggctggttacggcgg

SEQ ID NO: 51684 - DNA, 20 bp, Neisseria gonorrhoeae
tcatctcgaacagttcgcga

SEQ ID NO: 51685 - DNA, 20 bp, Neisseria gonorrhoeae
catctcgaacagttcgcgaa

SEQ ID NO: 51686 - DNA, 20 bp, Neisseria gonorrhoeae
atctcgaacagttcgcgaat

SEQ ID NO: 51687 - DNA, 20 bp, Neisseria gonorrhoeae
gcgaatcccaacgctactcc

SEQ ID NO: 51688 - DNA, 20 bp, Neisseria gonorrhoeae
cagacgacgtcaggttgaga

SEQ ID NO: 51689 - DNA, 20 bp, Neisseria gonorrhoeae
ggagcacaggggcagagtct

SEQ ID NO: 51690 - DNA, 20 bp, Neisseria gonorrhoeae
agggtcgtttgccggagcat

SEQ ID NO: 51691 - DNA, 20 bp, Neisseria gonorrhoeae
gggtcgtttgccggagcatt

SEQ ID NO: 51692 - DNA, 20 bp, Neisseria gonorrhoeae
gccggagcattcacgggaat

SEQ ID NO: 51693 - DNA, 20 bp, Neisseria gonorrhoeae
ccggagcattcacgggaatg

SEQ ID NO: 51694 - DNA, 20 bp, Neisseria gonorrhoeae
cgaggcaggggaagaaaagc

SEQ ID NO: 51695 - DNA, 20 bp, Neisseria gonorrhoeae
gaggcaggggaagaaaagca

SEQ ID NO: 51696 - DNA, 20 bp, Neisseria gonorrhoeae
cgcgggatttctgggctggg

SEQ ID NO: 51697 - DNA, 20 bp, Neisseria gonorrhoeae
ctgggctggggcggacattg

SEQ ID NO: 51698 - DNA, 20 bp, Neisseria gonorrhoeae
tgggctggggcggacattgt

SEQ ID NO: 51699 - DNA, 20 bp, Neisseria gonorrhoeae
gtgtccacttgcggataaac

SEQ ID NO: 51700 - DNA, 20 bp, Neisseria gonorrhoeae
tgtccacttgcggataaacg

SEQ ID NO: 51701 - DNA, 20 bp, Neisseria gonorrhoeae
cggataaacgacgtgggcgg

SEQ ID NO: 51702 - DNA, 20 bp, Neisseria gonorrhoeae
gcggctcatagtgcggaagg

SEQ ID NO: 51703 - DNA, 20 bp, Neisseria gonorrhoeae
cgcactatgagccgcgaagg

SEQ ID NO: 51704 - DNA, 20 bp, Neisseria gonorrhoeae
cgaggtaacgtggtcgatgt

SEQ ID NO: 51705 - DNA, 20 bp, Neisseria gonorrhoeae
cagcgcgcgccggtggacga

SEQ ID NO: 51706 - DNA, 20 bp, Neisseria gonorrhoeae
cctcgcaactgccttatgcc

SEQ ID NO: 51707 - DNA, 20 bp, Neisseria gonorrhoeae
tgccctgacggttgccgccg

SEQ ID NO: 51708 - DNA, 20 bp, Neisseria gonorrhoeae
ccgccgccgccgcatcgggc

SEQ ID NO: 51709 - DNA, 20 bp, Neisseria gonorrhoeae
gactttgaccgccatggcgg

SEQ ID NO: 51710 - DNA, 20 bp, Neisseria gonorrhoeae
gaccgccatggcggcggcaa

SEQ ID NO: 51711 - DNA, 20 bp, Neisseria gonorrhoeae
accgccatggcggcggcaat

SEQ ID NO: 51712 - DNA, 20 bp, Neisseria gonorrhoeae
tgcctgtggcaaacgccatc

SEQ ID NO: 51713 - DNA, 20 bp, Neisseria gonorrhoeae
gccacaggcacaagctgggg

SEQ ID NO: 51714 - DNA, 20 bp, Neisseria gonorrhoeae
aaacgggcatcagcacgcac

SEQ ID NO: 51715 - DNA, 20 bp, Neisseria gonorrhoeae
ggcgcgggaaactttaaact

SEQ ID NO: 51716 - DNA, 20 bp, Neisseria gonorrhoeae
gcgcgggaaactttaaactt

SEQ ID NO: 51717 - DNA, 20 bp, Neisseria gonorrhoeae
aaagtttcccgcgccaaact

SEQ ID NO: 51718 - DNA, 20 bp, Neisseria gonorrhoeae
aagtttcccgcgccaaactc

SEQ ID NO: 51719 - DNA, 20 bp, Neisseria gonorrhoeae
caggtgtgtcagaccgtcga

SEQ ID NO: 51720 - DNA, 20 bp, Neisseria gonorrhoeae
aggtgtgtcagaccgtcgac

SEQ ID NO: 51721 - DNA, 20 bp, Neisseria gonorrhoeae
ccgccgaccaaaaaggcaac

SEQ ID NO: 51722 - DNA, 20 bp, Neisseria gonorrhoeae
tggtcggcgttgcctttttg

SEQ ID NO: 51723 - DNA, 20 bp, Neisseria gonorrhoeae
ggtcggcgttgcctttttgg

SEQ ID NO: 51724 - DNA, 20 bp, Neisseria gonorrhoeae
gcgaattgatgccgacgacc

SEQ ID NO: 51725 - DNA, 20 bp, Neisseria gonorrhoeae
cgaattgatgccgacgacct

SEQ ID NO: 51726 - DNA, 20 bp, Neisseria gonorrhoeae
atgccgacgacctgtccttt

SEQ ID NO: 51727 - DNA, 20 bp, Neisseria gonorrhoeae
taagttgaacagcgggccgc

SEQ ID NO: 51728 - DNA, 20 bp, Neisseria gonorrhoeae
aagttgaacagcgggccgcc

SEQ ID NO: 51729 - DNA, 20 bp, Neisseria gonorrhoeae
gccgtcgccttgtttacgcc

SEQ ID NO: 51730 - DNA, 20 bp, Neisseria gonorrhoeae
tttacgccgacatcggtcgc

SEQ ID NO: 51731 - DNA, 20 bp, Neisseria gonorrhoeae
acgccgacatcggtcgcctg

SEQ ID NO: 51732 - DNA, 20 bp, Neisseria gonorrhoeae
cgccgacatcggtcgcctgc

SEQ ID NO: 51733 - DNA, 20 bp, Neisseria gonorrhoeae
ggcgcaggcgaccgatgtcg

SEQ ID NO: 51734 - DNA, 20 bp, Neisseria gonorrhoeae
cctcggttcggcggtaatgg

SEQ ID NO: 51735 - DNA, 20 bp, Neisseria gonorrhoeae
ctcggttcggcggtaatggc

SEQ ID NO: 51736 - DNA, 20 bp, Neisseria gonorrhoeae
ggcggtaatggcgaaattcg

SEQ ID NO: 51737 - DNA, 20 bp, Neisseria gonorrhoeae
gcgcccaaccgttatttggc

SEQ ID NO: 51738 - DNA, 20 bp, Neisseria gonorrhoeae
tttggcgtttaacgcatcgg

SEQ ID NO: 51739 - DNA, 20 bp, Neisseria gonorrhoeae
ggcggtgtgcgaaatgctgg

SEQ ID NO: 51740 - DNA, 20 bp, Neisseria gonorrhoeae
tgccgatgaaggcggcatcg

SEQ ID NO: 51741 - DNA, 20 bp, Neisseria gonorrhoeae
gccgatgaaggcggcatcgt

SEQ ID NO: 51742 - DNA, 20 bp, Neisseria gonorrhoeae
ccgatgaaggcggcatcgtt

SEQ ID NO: 51743 - DNA, 20 bp, Neisseria gonorrhoeae
atcggcaaaatcactgcggt

SEQ ID NO: 51744 - DNA, 20 bp, Neisseria gonorrhoeae
gacgttgcacactttcttgg

SEQ ID NO: 51745 - DNA, 20 bp, Neisseria gonorrhoeae
cacactttcttggcggggca

SEQ ID NO: 51746 - DNA, 20 bp, Neisseria gonorrhoeae
cttggcggggcagcccatat

SEQ ID NO: 51747 - DNA, 20 bp, Neisseria gonorrhoeae
ttggcggggcagcccatatt

SEQ ID NO: 51748 - DNA, 20 bp, Neisseria gonorrhoeae
gcggggcagcccatattgat

SEQ ID NO: 51749 - DNA, 20 bp, Neisseria gonorrhoeae
ttccgcgatttgaagcatta

SEQ ID NO: 51750 - DNA, 20 bp, Neisseria gonorrhoeae
tccgcgatttgaagcattat

SEQ ID NO: 51751 - DNA, 20 bp, Neisseria gonorrhoeae
ccgcgatttgaagcattatg

SEQ ID NO: 51752 - DNA, 20 bp, Neisseria gonorrhoeae
cgcgatttgaagcattatgc

SEQ ID NO: 51753 - DNA, 20 bp, Neisseria gonorrhoeae
ggcataatgcttcaaatcgc

SEQ ID NO: 51754 - DNA, 20 bp, Neisseria gonorrhoeae
ccatgccgccgttcgggttc

SEQ ID NO: 51755 - DNA, 20 bp, Neisseria gonorrhoeae
gggttcggacggcatctgtc

SEQ ID NO: 51756 - DNA, 20 bp, Neisseria gonorrhoeae
ggacggcatctgtctgcatg

SEQ ID NO: 51757 - DNA, 20 bp, Neisseria gonorrhoeae
ggaggtcgggcggaatcccg

SEQ ID NO: 51758 - DNA, 20 bp, Neisseria gonorrhoeae
cgcccgacctccgaaccatg

SEQ ID NO: 51759 - DNA, 20 bp, Neisseria gonorrhoeae
gcggctttggtcagccataa

SEQ ID NO: 51760 - DNA, 20 bp, Neisseria gonorrhoeae
ggtcagccataagctgcccg

SEQ ID NO: 51761 - DNA, 20 bp, Neisseria gonorrhoeae
gtcagccataagctgcccgt

SEQ ID NO: 51762 - DNA, 20 bp, Neisseria gonorrhoeae
cggaatacacggccttgcag

SEQ ID NO: 51763 - DNA, 20 bp, Neisseria gonorrhoeae
ggaatacacggccttgcagg

SEQ ID NO: 51764 - DNA, 20 bp, Neisseria gonorrhoeae
ccgggcaagctgggtatgga

SEQ ID NO: 51765 - DNA, 20 bp, Neisseria gonorrhoeae
cgggcaagctgggtatggac

SEQ ID NO: 51766 - DNA, 20 bp, Neisseria gonorrhoeae
ctgccgtccatacccagctt

SEQ ID NO: 51767 - DNA, 20 bp, Neisseria gonorrhoeae
cccggaaagccgcacagttt

SEQ ID NO: 51768 - DNA, 20 bp, Neisseria gonorrhoeae
cgccatatcgtccagcggca

SEQ ID NO: 51769 - DNA, 20 bp, Neisseria gonorrhoeae
agcgcgccggtgtatctgaa

SEQ ID NO: 51770 - DNA, 20 bp, Neisseria gonorrhoeae
ccagcacgtgaaagcgtcgc

SEQ ID NO: 51771 - DNA, 20 bp, Neisseria gonorrhoeae
agatacaccggcgcgctgaa

SEQ ID NO: 51772 - DNA, 20 bp, Neisseria gonorrhoeae
gcagaattcgacttcatgca

SEQ ID NO: 51773 - DNA, 20 bp, Neisseria gonorrhoeae
cagaattcgacttcatgcac

SEQ ID NO: 51774 - DNA, 20 bp, Neisseria gonorrhoeae
gacttcatgcactacgccct

SEQ ID NO: 51775 - DNA, 20 bp, Neisseria gonorrhoeae
atgcactacgccctcgcatc

SEQ ID NO: 51776 - DNA, 20 bp, Neisseria gonorrhoeae
tgcctgtccctcagcgccgc

SEQ ID NO: 51777 - DNA, 20 bp, Neisseria gonorrhoeae
cgacgggcgataaccacgcc

SEQ ID NO: 51778 - DNA, 20 bp, Neisseria gonorrhoeae
gtaggcttgcagacggctgc

SEQ ID NO: 51779 - DNA, 20 bp, Neisseria gonorrhoeae
cagacggctgcgggtacctt

SEQ ID NO: 51780 - DNA, 20 bp, Neisseria gonorrhoeae
cacgacgcgtacggatacga

SEQ ID NO: 51781 - DNA, 20 bp, Neisseria gonorrhoeae
acagtggtaatcggggttgc

SEQ ID NO: 51782 - DNA, 20 bp, Neisseria gonorrhoeae
cacaggcgtgccaacgtggc

SEQ ID NO: 51783 - DNA, 20 bp, Neisseria gonorrhoeae
gttggtgtgggtcatgaagc

SEQ ID NO: 51784 - DNA, 20 bp, Neisseria gonorrhoeae
gtgtgggtcatgaagcgtgt

SEQ ID NO: 51785 - DNA, 20 bp, Neisseria gonorrhoeae
atgacccacaccaacgaact

SEQ ID NO: 51786 - DNA, 20 bp, Neisseria gonorrhoeae
cggcggcatgttcgagggtt

SEQ ID NO: 51787 - DNA, 20 bp, Neisseria gonorrhoeae
gagggtttgggcggctttgc

SEQ ID NO: 51788 - DNA, 20 bp, Neisseria gonorrhoeae
gggcggctttgcctgtgttc

SEQ ID NO: 51789 - DNA, 20 bp, Neisseria gonorrhoeae
ggcggctttgcctgtgttct

SEQ ID NO: 51790 - DNA, 20 bp, Neisseria gonorrhoeae
gcctgtgttcttgcgtttgg

SEQ ID NO: 51791 - DNA, 20 bp, Neisseria gonorrhoeae
gtgtgccgtcgagttcggca

SEQ ID NO: 51792 - DNA, 20 bp, Neisseria gonorrhoeae
tgtgccgtcgagttcggcaa

SEQ ID NO: 51793 - DNA, 20 bp, Neisseria gonorrhoeae
ggcaaagcgggcaaggtggc

SEQ ID NO: 51794 - DNA, 20 bp, Neisseria gonorrhoeae
accacgctcgacagccgcca

SEQ ID NO: 51795 - DNA, 20 bp, Neisseria gonorrhoeae
ccacgctcgacagccgccac

SEQ ID NO: 51796 - DNA, 20 bp, Neisseria gonorrhoeae
ggcgagcagggcgggatttg

SEQ ID NO: 51797 - DNA, 20 bp, Neisseria gonorrhoeae
gccgctgcaagggctttttt

SEQ ID NO: 51798 - DNA, 20 bp, Neisseria gonorrhoeae
ccgctgcaagggcttttttg

SEQ ID NO: 51799 - DNA, 20 bp, Neisseria gonorrhoeae
tttgatgttttggggttgcg

SEQ ID NO: 51800 - DNA, 20 bp, Neisseria gonorrhoeae
ttgatgttttggggttgcgg

SEQ ID NO: 51801 - DNA, 20 bp, Neisseria gonorrhoeae
agggtgtgggtgtgccggtc

SEQ ID NO: 51802 - DNA, 20 bp, Neisseria gonorrhoeae
cggatgtggtggggaaggtt

SEQ ID NO: 51803 - DNA, 20 bp, Neisseria gonorrhoeae
cccaaccttccccaccacat

SEQ ID NO: 51804 - DNA, 20 bp, Neisseria gonorrhoeae
ccaaccttccccaccacatc

SEQ ID NO: 51805 - DNA, 20 bp, Neisseria gonorrhoeae
cccaccacatccgcaacgga

SEQ ID NO: 51806 - DNA, 20 bp, Neisseria gonorrhoeae
ggcgctcagtgcggcttcga

SEQ ID NO: 51807 - DNA, 20 bp, Neisseria gonorrhoeae
gaggtcgtcggcgttgaaac

SEQ ID NO: 51808 - DNA, 20 bp, Neisseria gonorrhoeae
aaactgatgaggaagttgca

SEQ ID NO: 51809 - DNA, 20 bp, Neisseria gonorrhoeae
cagtgtcgggcgaggcagtg

SEQ ID NO: 51810 - DNA, 20 bp, Neisseria gonorrhoeae
ctcatcagtttcaacgccga

SEQ ID NO: 51811 - DNA, 20 bp, Neisseria gonorrhoeae
agggttgtggtgtaggacgg

SEQ ID NO: 51812 - DNA, 20 bp, Neisseria gonorrhoeae
tggtgtaggacggcggtttt

SEQ ID NO: 51813 - DNA, 20 bp, Neisseria gonorrhoeae
tggtgtgcaggctgtgtccg

SEQ ID NO: 51814 - DNA, 20 bp, Neisseria gonorrhoeae
ggtgtgcaggctgtgtccga

SEQ ID NO: 51815 - DNA, 20 bp, Neisseria gonorrhoeae
gtgtgcaggctgtgtccgaa

SEQ ID NO: 51816 - DNA, 20 bp, Neisseria gonorrhoeae
ggcggggtataggacgacat

SEQ ID NO: 51817 - DNA, 20 bp, Neisseria gonorrhoeae
gcggggtataggacgacatc

SEQ ID NO: 51818 - DNA, 20 bp, Neisseria gonorrhoeae
ggtgcgttgttctgttcgcc

SEQ ID NO: 51819 - DNA, 20 bp, Neisseria gonorrhoeae
ttctgttcgccgctgtgttg

SEQ ID NO: 51820 - DNA, 20 bp, Neisseria gonorrhoeae
tgttcgccgctgtgttgtgc

SEQ ID NO: 51821 - DNA, 20 bp, Neisseria gonorrhoeae
gcggcttttttgaaggcgat

SEQ ID NO: 51822 - DNA, 20 bp, Neisseria gonorrhoeae
aaaaaagccgccaatctcgg

SEQ ID NO: 51823 - DNA, 20 bp, Neisseria gonorrhoeae
gcaggattgctgcacttgga

SEQ ID NO: 51824 - DNA, 20 bp, Neisseria gonorrhoeae
ctgcacttggactggacata

SEQ ID NO: 51825 - DNA, 20 bp, Neisseria gonorrhoeae
gactggacatacacccggct

SEQ ID NO: 51826 - DNA, 20 bp, Neisseria gonorrhoeae
ccgccatgcgcggtctttgt

SEQ ID NO: 51827 - DNA, 20 bp, Neisseria gonorrhoeae
gtcggtttccgcaggttcgg

SEQ ID NO: 51828 - DNA, 20 bp, Neisseria gonorrhoeae
tcggtttccgcaggttcggc

SEQ ID NO: 51829 - DNA, 20 bp, Neisseria gonorrhoeae
ccgcaggttcggctgtactg

SEQ ID NO: 51830 - DNA, 20 bp, Neisseria gonorrhoeae
cgcaggttcggctgtactgc

SEQ ID NO: 51831 - DNA, 20 bp, Neisseria gonorrhoeae
aaaccgatgcgggtgatgag

SEQ ID NO: 51832 - DNA, 20 bp, Neisseria gonorrhoeae
gagttcgggatcggagaggc

SEQ ID NO: 51833 - DNA, 20 bp, Neisseria gonorrhoeae
gggatcggagaggctgtgcc

SEQ ID NO: 51834 - DNA, 20 bp, Neisseria gonorrhoeae
caacctgttttgccgttttg

SEQ ID NO: 51835 - DNA, 20 bp, Neisseria gonorrhoeae
aacctgttttgccgttttga

SEQ ID NO: 51836 - DNA, 20 bp, Neisseria gonorrhoeae
ttcgatcggctgccaatcaa

SEQ ID NO: 51837 - DNA, 20 bp, Neisseria gonorrhoeae
gatcggctgccaatcaatca

SEQ ID NO: 51838 - DNA, 20 bp, Neisseria gonorrhoeae
ggcagtcatggcttgtgcgg

SEQ ID NO: 51839 - DNA, 20 bp, Neisseria gonorrhoeae
gcagtcatggcttgtgcggt

SEQ ID NO: 51840 - DNA, 20 bp, Neisseria gonorrhoeae
ccgctatcggagttggacca

SEQ ID NO: 51841 - DNA, 20 bp, Neisseria gonorrhoeae
ttcagcaggcagaatccgcc

SEQ ID NO: 51842 - DNA, 20 bp, Neisseria gonorrhoeae
agcaggcagaatccgccggc

SEQ ID NO: 51843 - DNA, 20 bp, Neisseria gonorrhoeae
gccgcttttcgcgtgatgcc

SEQ ID NO: 51844 - DNA, 20 bp, Neisseria gonorrhoeae
ccgcttttcgcgtgatgccc

SEQ ID NO: 51845 - DNA, 20 bp, Neisseria gonorrhoeae
tcgcgtgatgccccggcggg

SEQ ID NO: 51846 - DNA, 20 bp, Neisseria gonorrhoeae
gccccggggtcgtgcccggt

SEQ ID NO: 51847 - DNA, 20 bp, Neisseria gonorrhoeae
ccccggggtcgtgcccggtg

SEQ ID NO: 51848 - DNA, 20 bp, Neisseria gonorrhoeae
tccaccccgcctgcaccggg

SEQ ID NO: 51849 - DNA, 20 bp, Neisseria gonorrhoeae
ccaccccgcctgcaccgggc

SEQ ID NO: 51850 - DNA, 20 bp, Neisseria gonorrhoeae
caccccgcctgcaccgggca

SEQ ID NO: 51851 - DNA, 20 bp, Neisseria gonorrhoeae
atcggcccgcaagtcggtga

SEQ ID NO: 51852 - DNA, 20 bp, Neisseria gonorrhoeae
tcggcccgcaagtcggtgag

SEQ ID NO: 51853 - DNA, 20 bp, Neisseria gonorrhoeae
gtaaataatggattgatggc

SEQ ID NO: 51854 - DNA, 20 bp, Neisseria gonorrhoeae
atggctttaggttttgtcgt

SEQ ID NO: 51855 - DNA, 20 bp, Neisseria gonorrhoeae
aggttttgtcgttatcggca

SEQ ID NO: 51856 - DNA, 20 bp, Neisseria gonorrhoeae
gcacaagacggttttttcgc

SEQ ID NO: 51857 - DNA, 20 bp, Neisseria gonorrhoeae
tttcgccgttgatggcgtag

SEQ ID NO: 51858 - DNA, 20 bp, Neisseria gonorrhoeae
ttcgccgttgatggcgtagc

SEQ ID NO: 51859 - DNA, 20 bp, Neisseria gonorrhoeae
tcgccgttgatggcgtagcg

SEQ ID NO: 51860 - DNA, 20 bp, Neisseria gonorrhoeae
cgccgttgatggcgtagcgg

SEQ ID NO: 51861 - DNA, 20 bp, Neisseria gonorrhoeae
ttccgcaggcgtgcagcatg

SEQ ID NO: 51862 - DNA, 20 bp, Neisseria gonorrhoeae
tccgcaggcgtgcagcatgg

SEQ ID NO: 51863 - DNA, 20 bp, Neisseria gonorrhoeae
ccgcaggcgtgcagcatggg

SEQ ID NO: 51864 - DNA, 20 bp, Neisseria gonorrhoeae
cgcaggcgtgcagcatgggt

SEQ ID NO: 51865 - DNA, 20 bp, Neisseria gonorrhoeae
gatgctgggtttgggttcgc

SEQ ID NO: 51866 - DNA, 20 bp, Neisseria gonorrhoeae
caccgcatccaaaccggtcg

SEQ ID NO: 51867 - DNA, 20 bp, Neisseria gonorrhoeae
cgcccgccgtgggtaaagat

SEQ ID NO: 51868 - DNA, 20 bp, Neisseria gonorrhoeae
cccagcgtgtgttttcgggg

SEQ ID NO: 51869 - DNA, 20 bp, Neisseria gonorrhoeae
ccagcgtgtgttttcggggt

SEQ ID NO: 51870 - DNA, 20 bp, Neisseria gonorrhoeae
tcggggttgacggctttggc

SEQ ID NO: 51871 - DNA, 20 bp, Neisseria gonorrhoeae
agcaggcggcggatgtcggc

SEQ ID NO: 51872 - DNA, 20 bp, Neisseria gonorrhoeae
ccggacaagtcttcatcccg

SEQ ID NO: 51873 - DNA, 20 bp, Neisseria gonorrhoeae
atcccgctgaccgtcggcgg

SEQ ID NO: 51874 - DNA, 20 bp, Neisseria gonorrhoeae
ccgacatccgccgcctgctc

SEQ ID NO: 51875 - DNA, 20 bp, Neisseria gonorrhoeae
ttcggcggcacacagggcgc

SEQ ID NO: 51876 - DNA, 20 bp, Neisseria gonorrhoeae
tcggcggcacacagggcgcg

SEQ ID NO: 51877 - DNA, 20 bp, Neisseria gonorrhoeae
cggcggcacacagggcgcgg

SEQ ID NO: 51878 - DNA, 20 bp, Neisseria gonorrhoeae
ggcggcacacagggcgcgga

SEQ ID NO: 51879 - DNA, 20 bp, Neisseria gonorrhoeae
gacgacatccgcgccctgtg

SEQ ID NO: 51880 - DNA, 20 bp, Neisseria gonorrhoeae
accggtttgcgcaggccttg

SEQ ID NO: 51881 - DNA, 20 bp, Neisseria gonorrhoeae
gcgcaggccttgcagcagcg

SEQ ID NO: 51882 - DNA, 20 bp, Neisseria gonorrhoeae
cgcaggccttgcagcagcgg

SEQ ID NO: 51883 - DNA, 20 bp, Neisseria gonorrhoeae
cagcagcgggccgacgctca

SEQ ID NO: 51884 - DNA, 20 bp, Neisseria gonorrhoeae
gcactgcgttggacggcttt

SEQ ID NO: 51885 - DNA, 20 bp, Neisseria gonorrhoeae
ggcaaggttcaattggtgtg

SEQ ID NO: 51886 - DNA, 20 bp, Neisseria gonorrhoeae
gcaaggttcaattggtgtgc

SEQ ID NO: 51887 - DNA, 20 bp, Neisseria gonorrhoeae
aattggtgtgccagcgcgtc

SEQ ID NO: 51888 - DNA, 20 bp, Neisseria gonorrhoeae
gtgtgccagcgcgtcggcat

SEQ ID NO: 51889 - DNA, 20 bp, Neisseria gonorrhoeae
tcggaacggacggcgaagac

SEQ ID NO: 51890 - DNA, 20 bp, Neisseria gonorrhoeae
gcggcatcgagtgcggcaac

SEQ ID NO: 51891 - DNA, 20 bp, Neisseria gonorrhoeae
gccgaccagtgcgtcgaacc

SEQ ID NO: 51892 - DNA, 20 bp, Neisseria gonorrhoeae
ccgaccagtgcgtcgaacca

SEQ ID NO: 51893 - DNA, 20 bp, Neisseria gonorrhoeae
tgccttgcgcgagcagggtt

SEQ ID NO: 51894 - DNA, 20 bp, Neisseria gonorrhoeae
gccttgcgcgagcagggttt

SEQ ID NO: 51895 - DNA, 20 bp, Neisseria gonorrhoeae
ggaaatgccggtcaattcca

SEQ ID NO: 51896 - DNA, 20 bp, Neisseria gonorrhoeae
caacatggcttcgatgcgct

SEQ ID NO: 51897 - DNA, 20 bp, Neisseria gonorrhoeae
gatgcgctgtcgctcttgcg

SEQ ID NO: 51898 - DNA, 20 bp, Neisseria gonorrhoeae
cgccgtcctgcctttgccgt

SEQ ID NO: 51899 - DNA, 20 bp, Neisseria gonorrhoeae
gccgttgccgagaccgtagg

SEQ ID NO: 51900 - DNA, 20 bp, Neisseria gonorrhoeae
catcagcttgaggaagacga

SEQ ID NO: 51901 - DNA, 20 bp, Neisseria gonorrhoeae
atcagcttgaggaagacgag

SEQ ID NO: 51902 - DNA, 20 bp, Neisseria gonorrhoeae
gcactcgtcttcctcaagct

SEQ ID NO: 51903 - DNA, 20 bp, Neisseria gonorrhoeae
ctcaagctgatgaaagagtt

SEQ ID NO: 51904 - DNA, 20 bp, Neisseria gonorrhoeae
accgccaccctgctgctgac

SEQ ID NO: 51905 - DNA, 20 bp, Neisseria gonorrhoeae
tttggcggcaaccggtacgc

SEQ ID NO: 51906 - DNA, 20 bp, Neisseria gonorrhoeae
ttggcggcaaccggtacgcc

SEQ ID NO: 51907 - DNA, 20 bp, Neisseria gonorrhoeae
tggcggcaaccggtacgcct

SEQ ID NO: 51908 - DNA, 20 bp, Neisseria gonorrhoeae
ggcggcaaccggtacgcctt

SEQ ID NO: 51909 - DNA, 20 bp, Neisseria gonorrhoeae
gcggcaaccggtacgccttt

SEQ ID NO: 51910 - DNA, 20 bp, Neisseria gonorrhoeae
acgcgtttgcgacagtcggc

SEQ ID NO: 51911 - DNA, 20 bp, Neisseria gonorrhoeae
gcgacagtcggccatgcgtt

SEQ ID NO: 51912 - DNA, 20 bp, Neisseria gonorrhoeae
cgacagtcggccatgcgttc

SEQ ID NO: 51913 - DNA, 20 bp, Neisseria gonorrhoeae
gaaatcgcgtccgagcattt

SEQ ID NO: 51914 - DNA, 20 bp, Neisseria gonorrhoeae
cgaacgcatggccgactgtc

SEQ ID NO: 51915 - DNA, 20 bp, Neisseria gonorrhoeae
gagggcgcgtcttcgggctt

SEQ ID NO: 51916 - DNA, 20 bp, Neisseria gonorrhoeae
gggcttgggtttttcgacaa

SEQ ID NO: 51917 - DNA, 20 bp, Neisseria gonorrhoeae
ggtttttcgacaatgccggt

SEQ ID NO: 51918 - DNA, 20 bp, Neisseria gonorrhoeae
ttcgacaatgccggtaatgc

SEQ ID NO: 51919 - DNA, 20 bp, Neisseria gonorrhoeae
tcgacaatgccggtaatgcg

SEQ ID NO: 51920 - DNA, 20 bp, Neisseria gonorrhoeae
ttccgccgcttcttccaagc

SEQ ID NO: 51921 - DNA, 20 bp, Neisseria gonorrhoeae
tccgccgcttcttccaagcc

SEQ ID NO: 51922 - DNA, 20 bp, Neisseria gonorrhoeae
ccgccgcttcttccaagccg

SEQ ID NO: 51923 - DNA, 20 bp, Neisseria gonorrhoeae
cgccgcttcttccaagccga

SEQ ID NO: 51924 - DNA, 20 bp, Neisseria gonorrhoeae
ttccaagccgaaccagccgt

SEQ ID NO: 51925 - DNA, 20 bp, Neisseria gonorrhoeae
aacggcactgcagatatcgt

SEQ ID NO: 51926 - DNA, 20 bp, Neisseria gonorrhoeae
ttaacgatatctgcagtgcc

SEQ ID NO: 51927 - DNA, 20 bp, Neisseria gonorrhoeae
taacgatatctgcagtgccg

SEQ ID NO: 51928 - DNA, 20 bp, Neisseria gonorrhoeae
aacgatatctgcagtgccgt

SEQ ID NO: 51929 - DNA, 20 bp, Neisseria gonorrhoeae
acgatatctgcagtgccgtt

SEQ ID NO: 51930 - DNA, 20 bp, Neisseria gonorrhoeae
ccagcgcgtgacagacggca

SEQ ID NO: 51931 - DNA, 20 bp, Neisseria gonorrhoeae
tgccgggatgggttggttcg

SEQ ID NO: 51932 - DNA, 20 bp, Neisseria gonorrhoeae
gccgggatgggttggttcga

SEQ ID NO: 51933 - DNA, 20 bp, Neisseria gonorrhoeae
ccgggatgggttggttcgat

SEQ ID NO: 51934 - DNA, 20 bp, Neisseria gonorrhoeae
gttcgatgccgtctgtcacg

SEQ ID NO: 51935 - DNA, 20 bp, Neisseria gonorrhoeae
tggcggcatatgctcaactg

SEQ ID NO: 51936 - DNA, 20 bp, Neisseria gonorrhoeae
ggcggcatatgctcaactgg

SEQ ID NO: 51937 - DNA, 20 bp, Neisseria gonorrhoeae
gcggcatatgctcaactggc

SEQ ID NO: 51938 - DNA, 20 bp, Neisseria gonorrhoeae
ccgtcgccatcctgcctatg

SEQ ID NO: 51939 - DNA, 20 bp, Neisseria gonorrhoeae
tcctttatcctgctgatacc

SEQ ID NO: 51940 - DNA, 20 bp, Neisseria gonorrhoeae
cctttatcctgctgataccc

SEQ ID NO: 51941 - DNA, 20 bp, Neisseria gonorrhoeae
ctttatcctgctgatacccg

SEQ ID NO: 51942 - DNA, 20 bp, Neisseria gonorrhoeae
atcctgctgatacccgccgc

SEQ ID NO: 51943 - DNA, 20 bp, Neisseria gonorrhoeae
tcctgctgatacccgccgcc

SEQ ID NO: 51944 - DNA, 20 bp, Neisseria gonorrhoeae
aagccgattttgccgagcag

SEQ ID NO: 51945 - DNA, 20 bp, Neisseria gonorrhoeae
tgccgagcagcgcggtcagt

SEQ ID NO: 51946 - DNA, 20 bp, Neisseria gonorrhoeae
gccgagcagcgcggtcagtt

SEQ ID NO: 51947 - DNA, 20 bp, Neisseria gonorrhoeae
ccgagcagcgcggtcagttc

SEQ ID NO: 51948 - DNA, 20 bp, Neisseria gonorrhoeae
gtcgaaacagccttggatgt

SEQ ID NO: 51949 - DNA, 20 bp, Neisseria gonorrhoeae
ctgcccgcggcttctccggc

SEQ ID NO: 51950 - DNA, 20 bp, Neisseria gonorrhoeae
tccggcgacgacgtagtcgg

SEQ ID NO: 51951 - DNA, 20 bp, Neisseria gonorrhoeae
ttttggacacgctgccggac

SEQ ID NO: 51952 - DNA, 20 bp, Neisseria gonorrhoeae
tttggacacgctgccggaca

SEQ ID NO: 51953 - DNA, 20 bp, Neisseria gonorrhoeae
ttggacacgctgccggacac

SEQ ID NO: 51954 - DNA, 20 bp, Neisseria gonorrhoeae
tggagcggaacggattcggt

SEQ ID NO: 51955 - DNA, 20 bp, Neisseria gonorrhoeae
ggtttgcttggcggacggtg

SEQ ID NO: 51956 - DNA, 20 bp, Neisseria gonorrhoeae
gcttggcggacggtgtttcg

SEQ ID NO: 51957 - DNA, 20 bp, Neisseria gonorrhoeae
cttggcggacggtgtttcgg

SEQ ID NO: 51958 - DNA, 20 bp, Neisseria gonorrhoeae
gcggacggtgtttcggcaaa

SEQ ID NO: 51959 - DNA, 20 bp, Neisseria gonorrhoeae
caacgcttcgagttcgcgga

SEQ ID NO: 51960 - DNA, 20 bp, Neisseria gonorrhoeae
gagttcgcggaacaggcggt

SEQ ID NO: 51961 - DNA, 20 bp, Neisseria gonorrhoeae
gcggaacaggcggtcgtatt

SEQ ID NO: 51962 - DNA, 20 bp, Neisseria gonorrhoeae
ggcatcgggtatgctgggcg

SEQ ID NO: 51963 - DNA, 20 bp, Neisseria gonorrhoeae
cgcgaactcgaagcgttgga

SEQ ID NO: 51964 - DNA, 20 bp, Neisseria gonorrhoeae
gataaaggcggcaaggtcgg

SEQ ID NO: 51965 - DNA, 20 bp, Neisseria gonorrhoeae
ccgcctttatcgaagtggct

SEQ ID NO: 51966 - DNA, 20 bp, Neisseria gonorrhoeae
atcgaagtggcttccgcact

SEQ ID NO: 51967 - DNA, 20 bp, Neisseria gonorrhoeae
tcgaagtggcttccgcactg

SEQ ID NO: 51968 - DNA, 20 bp, Neisseria gonorrhoeae
cgcactggacgcattctgcg

SEQ ID NO: 51969 - DNA, 20 bp, Neisseria gonorrhoeae
ggcaatctggaaatggtcgt

SEQ ID NO: 51970 - DNA, 20 bp, Neisseria gonorrhoeae
tcggctgcaccatggacgac

SEQ ID NO: 51971 - DNA, 20 bp, Neisseria gonorrhoeae
ccagattgccgaacccatcc

SEQ ID NO: 51972 - DNA, 20 bp, Neisseria gonorrhoeae
cagattgccgaacccatccc

SEQ ID NO: 51973 - DNA, 20 bp, Neisseria gonorrhoeae
ccgaacccatcccgggcatc

SEQ ID NO: 51974 - DNA, 20 bp, Neisseria gonorrhoeae
ggcaaacggttcgaaatcgc

SEQ ID NO: 51975 - DNA, 20 bp, Neisseria gonorrhoeae
gaaatcgcagccttccagtt

SEQ ID NO: 51976 - DNA, 20 bp, Neisseria gonorrhoeae
cagttcgatgccgatggaaa

SEQ ID NO: 51977 - DNA, 20 bp, Neisseria gonorrhoeae
gatgccgatggaaaacgcgt

SEQ ID NO: 51978 - DNA, 20 bp, Neisseria gonorrhoeae
cacttctcccgcccccgaaa

SEQ ID NO: 51979 - DNA, 20 bp, Neisseria gonorrhoeae
gcaaacagcttttccaccgc

SEQ ID NO: 51980 - DNA, 20 bp, Neisseria gonorrhoeae
tccaccgcatccgtgccgta

SEQ ID NO: 51981 - DNA, 20 bp, Neisseria gonorrhoeae
ccaccgcatccgtgccgtat

SEQ ID NO: 51982 - DNA, 20 bp, Neisseria gonorrhoeae
caccgcatccgtgccgtatt

SEQ ID NO: 51983 - DNA, 20 bp, Neisseria gonorrhoeae
gaacggcggcagcgaaatgt

SEQ ID NO: 51984 - DNA, 20 bp, Neisseria gonorrhoeae
gaccctgctgttggatgtgc

SEQ ID NO: 51985 - DNA, 20 bp, Neisseria gonorrhoeae
accctgctgttggatgtgcc

SEQ ID NO: 51986 - DNA, 20 bp, Neisseria gonorrhoeae
gatgtgccgctggaagtatc

SEQ ID NO: 51987 - DNA, 20 bp, Neisseria gonorrhoeae
gagcaggagcaggcggattt

SEQ ID NO: 51988 - DNA, 20 bp, Neisseria gonorrhoeae
ctcgcgcgcctgtccgatac

SEQ ID NO: 51989 - DNA, 20 bp, Neisseria gonorrhoeae
gctgctgttccgtaaaacag

SEQ ID NO: 51990 - DNA, 20 bp, Neisseria gonorrhoeae
ctgctgttccgtaaaacagg

SEQ ID NO: 51991 - DNA, 20 bp, Neisseria gonorrhoeae
cgtaaaacaggtgcgccgac

SEQ ID NO: 51992 - DNA, 20 bp, Neisseria gonorrhoeae
tacggaacagcagcaaaggc

SEQ ID NO: 51993 - DNA, 20 bp, Neisseria gonorrhoeae
acggaacagcagcaaaggct

SEQ ID NO: 51994 - DNA, 20 bp, Neisseria gonorrhoeae
tttggcggtttcgacggcga

SEQ ID NO: 51995 - DNA, 20 bp, Neisseria gonorrhoeae
ggcggtttcgacggcgatgg

SEQ ID NO: 51996 - DNA, 20 bp, Neisseria gonorrhoeae
gcggtttcgacggcgatggg

SEQ ID NO: 51997 - DNA, 20 bp, Neisseria gonorrhoeae
cgacggcgatggggtagccg

SEQ ID NO: 51998 - DNA, 20 bp, Neisseria gonorrhoeae
gacggcgatggggtagccgt

SEQ ID NO: 51999 - DNA, 20 bp, Neisseria gonorrhoeae
gatgggttcggttgtgggcg

SEQ ID NO: 52000 - DNA, 20 bp, Neisseria gonorrhoeae
ggttgtgggcgagcgtttcg

SEQ ID NO: 52001 - DNA, 20 bp, Neisseria gonorrhoeae
tgggcgagcgtttcgtacag

SEQ ID NO: 52002 - DNA, 20 bp, Neisseria gonorrhoeae
cgtacagggtgtccgccgtg

SEQ ID NO: 52003 - DNA, 20 bp, Neisseria gonorrhoeae
gtacagggtgtccgccgtgc

SEQ ID NO: 52004 - DNA, 20 bp, Neisseria gonorrhoeae
cctacaaagcgcgcattatg

SEQ ID NO: 52005 - DNA, 20 bp, Neisseria gonorrhoeae
tggcggcgttgcccgaaggc

SEQ ID NO: 52006 - DNA, 20 bp, Neisseria gonorrhoeae
cccgaaggcagcgcgtttga

SEQ ID NO: 52007 - DNA, 20 bp, Neisseria gonorrhoeae
gagccgctgatgacgcttta

SEQ ID NO: 52008 - DNA, 20 bp, Neisseria gonorrhoeae
agccgctgatgacgctttac

SEQ ID NO: 52009 - DNA, 20 bp, Neisseria gonorrhoeae
gaacacatcaccaccgccga

SEQ ID NO: 52010 - DNA, 20 bp, Neisseria gonorrhoeae
tggaagcgggcgacaacgtt

SEQ ID NO: 52011 - DNA, 20 bp, Neisseria gonorrhoeae
ggaagcgggcgacaacgttg

SEQ ID NO: 52012 - DNA, 20 bp, Neisseria gonorrhoeae
gaagcgggcgacaacgttgc

SEQ ID NO: 52013 - DNA, 20 bp, Neisseria gonorrhoeae
tcgcccgcttccaaaacgag

SEQ ID NO: 52014 - DNA, 20 bp, Neisseria gonorrhoeae
gtcgccgccgttaccggcga

SEQ ID NO: 52015 - DNA, 20 bp, Neisseria gonorrhoeae
ccggcgagaaggcgcacaaa

SEQ ID NO: 52016 - DNA, 20 bp, Neisseria gonorrhoeae
ttcctcggcaccgactccgc

SEQ ID NO: 52017 - DNA, 20 bp, Neisseria gonorrhoeae
ctcggcaccgactccgcgcc

SEQ ID NO: 52018 - DNA, 20 bp, Neisseria gonorrhoeae
ggcgtgcggcgcggagtcgg

SEQ ID NO: 52019 - DNA, 20 bp, Neisseria gonorrhoeae
agacggccttcgatactggc

SEQ ID NO: 52020 - DNA, 20 bp, Neisseria gonorrhoeae
gatactggcggacgcgatgg

SEQ ID NO: 52021 - DNA, 20 bp, Neisseria gonorrhoeae
gccgccgtcagcttcgatgc

SEQ ID NO: 52022 - DNA, 20 bp, Neisseria gonorrhoeae
ccgccgtcagcttcgatgcc

SEQ ID NO: 52023 - DNA, 20 bp, Neisseria gonorrhoeae
gatgccgatttcaacacggc

SEQ ID NO: 52024 - DNA, 20 bp, Neisseria gonorrhoeae
ccgaggcgctcggcggtgtg

SEQ ID NO: 52025 - DNA, 20 bp, Neisseria gonorrhoeae
tcgtcgtggaggcgatgcgc

SEQ ID NO: 52026 - DNA, 20 bp, Neisseria gonorrhoeae
cgtcgtggaggcgatgcgcc

SEQ ID NO: 52027 - DNA, 20 bp, Neisseria gonorrhoeae
gtcgtggaggcgatgcgcct

SEQ ID NO: 52028 - DNA, 20 bp, Neisseria gonorrhoeae
tgattcagcctgtcgttgag

SEQ ID NO: 52029 - DNA, 20 bp, Neisseria gonorrhoeae
cctttagacgcttccacgcc

SEQ ID NO: 52030 - DNA, 20 bp, Neisseria gonorrhoeae
agacgcttccacgccgccgg

SEQ ID NO: 52031 - DNA, 20 bp, Neisseria gonorrhoeae
gacgcttccacgccgccgga

SEQ ID NO: 52032 - DNA, 20 bp, Neisseria gonorrhoeae
cacgccgccggatacgtcga

SEQ ID NO: 52033 - DNA, 20 bp, Neisseria gonorrhoeae
cgctccggtgatgcggacgg

SEQ ID NO: 52034 - DNA, 20 bp, Neisseria gonorrhoeae
aaggcgacggattcggaggc

SEQ ID NO: 52035 - DNA, 20 bp, Neisseria gonorrhoeae
ggaggcgacggcataggatt

SEQ ID NO: 52036 - DNA, 20 bp, Neisseria gonorrhoeae
cctgccttcgctgtcggttt

SEQ ID NO: 52037 - DNA, 20 bp, Neisseria gonorrhoeae
ctgccttcgctgtcggtttg

SEQ ID NO: 52038 - DNA, 20 bp, Neisseria gonorrhoeae
gctgtcggtttgcgaaccca

SEQ ID NO: 52039 - DNA, 20 bp, Neisseria gonorrhoeae
tcttcgcctgccaagtcctg

SEQ ID NO: 52040 - DNA, 20 bp, Neisseria gonorrhoeae
gcctgccaagtcctgcggtt

SEQ ID NO: 52041 - DNA, 20 bp, Neisseria gonorrhoeae
gtcggcggcggtttccccgt

SEQ ID NO: 52042 - DNA, 20 bp, Neisseria gonorrhoeae
tcggcggcggtttccccgtt

SEQ ID NO: 52043 - DNA, 20 bp, Neisseria gonorrhoeae
ccccgttttcggcggcggat

SEQ ID NO: 52044 - DNA, 20 bp, Neisseria gonorrhoeae
gattgcaccaatgtccaccg

SEQ ID NO: 52045 - DNA, 20 bp, Neisseria gonorrhoeae
attgcaccaatgtccaccgg

SEQ ID NO: 52046 - DNA, 20 bp, Neisseria gonorrhoeae
caccaatgtccaccggcagt

SEQ ID NO: 52047 - DNA, 20 bp, Neisseria gonorrhoeae
caatacggtcaacgcgcagg

SEQ ID NO: 52048 - DNA, 20 bp, Neisseria gonorrhoeae
ctaacgccgcctgcgcgttg

SEQ ID NO: 52049 - DNA, 20 bp, Neisseria gonorrhoeae
gggcgcaccgattggcgtac

SEQ ID NO: 52050 - DNA, 20 bp, Neisseria gonorrhoeae
gcgtactgcacggcttccgc

SEQ ID NO: 52051 - DNA, 20 bp, Neisseria gonorrhoeae
cgcagctatctgatgcagga

SEQ ID NO: 52052 - DNA, 20 bp, Neisseria gonorrhoeae
gggacgcactctgtttccgc

SEQ ID NO: 52053 - DNA, 20 bp, Neisseria gonorrhoeae
gccgttttcgtcctgcatca

SEQ ID NO: 52054 - DNA, 20 bp, Neisseria gonorrhoeae
ccttgagttacgcttatttt

SEQ ID NO: 52055 - DNA, 20 bp, Neisseria gonorrhoeae
agttacgcttatttttccgt

SEQ ID NO: 52056 - DNA, 20 bp, Neisseria gonorrhoeae
cgcttatttttccgtttaaa

SEQ ID NO: 52057 - DNA, 20 bp, Neisseria gonorrhoeae
tttttccgtttaaattcgcg

SEQ ID NO: 52058 - DNA, 20 bp, Neisseria gonorrhoeae
ttccgtttaaattcgcgccg

SEQ ID NO: 52059 - DNA, 20 bp, Neisseria gonorrhoeae
tgctttggcgtgtttgacgc

SEQ ID NO: 52060 - DNA, 20 bp, Neisseria gonorrhoeae
ggcgtgtttgacgctgacgg

SEQ ID NO: 52061 - DNA, 20 bp, Neisseria gonorrhoeae
gcgtgtttgacgctgacggc

SEQ ID NO: 52062 - DNA, 20 bp, Neisseria gonorrhoeae
gacgctgacggcatattggg

SEQ ID NO: 52063 - DNA, 20 bp, Neisseria gonorrhoeae
acgctgacggcatattgggg

SEQ ID NO: 52064 - DNA, 20 bp, Neisseria gonorrhoeae
gcgcattgccccgagctgtc

SEQ ID NO: 52065 - DNA, 20 bp, Neisseria gonorrhoeae
ccccgagctgtcccaaattc

SEQ ID NO: 52066 - DNA, 20 bp, Neisseria gonorrhoeae
cgcgcgcgggcatcgtacac

SEQ ID NO: 52067 - DNA, 20 bp, Neisseria gonorrhoeae
ggacaaagaaaccagcgggc

SEQ ID NO: 52068 - DNA, 20 bp, Neisseria gonorrhoeae
ctttgtccaaacggtgtacg

SEQ ID NO: 52069 - DNA, 20 bp, Neisseria gonorrhoeae
ccggcgacccggtttacggc

SEQ ID NO: 52070 - DNA, 20 bp, Neisseria gonorrhoeae
ccgtaaaccgggtcgccggc

SEQ ID NO: 52071 - DNA, 20 bp, Neisseria gonorrhoeae
gcctcgcgcatatggacgcg

SEQ ID NO: 52072 - DNA, 20 bp, Neisseria gonorrhoeae
ggtgcgtcctgcccgttccg

SEQ ID NO: 52073 - DNA, 20 bp, Neisseria gonorrhoeae
gtgcgtcctgcccgttccga

SEQ ID NO: 52074 - DNA, 20 bp, Neisseria gonorrhoeae
gggtatcgaggcagacgcat

SEQ ID NO: 52075 - DNA, 20 bp, Neisseria gonorrhoeae
ggtatcgaggcagacgcatt

SEQ ID NO: 52076 - DNA, 20 bp, Neisseria gonorrhoeae
gcactgtttgccgagcgcgt

SEQ ID NO: 52077 - DNA, 20 bp, Neisseria gonorrhoeae
gccgagcgcgtggaaggcaa

SEQ ID NO: 52078 - DNA, 20 bp, Neisseria gonorrhoeae
ccgagcgcgtggaaggcaat

SEQ ID NO: 52079 - DNA, 20 bp, Neisseria gonorrhoeae
ccaatgttgcccgcttcgac

SEQ ID NO: 52080 - DNA, 20 bp, Neisseria gonorrhoeae
cccgcttcgacgcgttccaa

SEQ ID NO: 52081 - DNA, 20 bp, Neisseria gonorrhoeae
gacgcgttccaactggcagg

SEQ ID NO: 52082 - DNA, 20 bp, Neisseria gonorrhoeae
caactggcaggcgcgtggat

SEQ ID NO: 52083 - DNA, 20 bp, Neisseria gonorrhoeae
atccacgcgcctgccagttg

SEQ ID NO: 52084 - DNA, 20 bp, Neisseria gonorrhoeae
ggggcgacaaacagacgctc

SEQ ID NO: 52085 - DNA, 20 bp, Neisseria gonorrhoeae
gggcgacaaacagacgctcg

SEQ ID NO: 52086 - DNA, 20 bp, Neisseria gonorrhoeae
accgcaagcggtgcgagcgt

SEQ ID NO: 52087 - DNA, 20 bp, Neisseria gonorrhoeae
gtcgccccaaagcctgaggc

SEQ ID NO: 52088 - DNA, 20 bp, Neisseria gonorrhoeae
tcgccccaaagcctgaggct

SEQ ID NO: 52089 - DNA, 20 bp, Neisseria gonorrhoeae
ggcggcaagctggtgcagcg

SEQ ID NO: 52090 - DNA, 20 bp, Neisseria gonorrhoeae
aagccagcggctttccacaa

SEQ ID NO: 52091 - DNA, 20 bp, Neisseria gonorrhoeae
ccacaatgcggcggctcctg

SEQ ID NO: 52092 - DNA, 20 bp, Neisseria gonorrhoeae
cacaatgcggcggctcctgt

SEQ ID NO: 52093 - DNA, 20 bp, Neisseria gonorrhoeae
gacgacaggagccgccgcat

SEQ ID NO: 52094 - DNA, 20 bp, Neisseria gonorrhoeae
agcccgtagccgtcatagcc

SEQ ID NO: 52095 - DNA, 20 bp, Neisseria gonorrhoeae
ccatcgcgcgcggctatgac

SEQ ID NO: 52096 - DNA, 20 bp, Neisseria gonorrhoeae
catcgcgcgcggctatgacg

SEQ ID NO: 52097 - DNA, 20 bp, Neisseria gonorrhoeae
gcccgaacgtgcggtgttgt

SEQ ID NO: 52098 - DNA, 20 bp, Neisseria gonorrhoeae
cccgaacgtgcggtgttgtc

SEQ ID NO: 52099 - DNA, 20 bp, Neisseria gonorrhoeae
tcgatcgccaaaaccagcca

SEQ ID NO: 52100 - DNA, 20 bp, Neisseria gonorrhoeae
tggcgatcgacaacaccgca

SEQ ID NO: 52101 - DNA, 20 bp, Neisseria gonorrhoeae
ggcgatcgacaacaccgcac

SEQ ID NO: 52102 - DNA, 20 bp, Neisseria gonorrhoeae
tactggatacacactgccct

SEQ ID NO: 52103 - DNA, 20 bp, Neisseria gonorrhoeae
ccggcctgcccgacctctat

SEQ ID NO: 52104 - DNA, 20 bp, Neisseria gonorrhoeae
cggcctgcccgacctctatg

SEQ ID NO: 52105 - DNA, 20 bp, Neisseria gonorrhoeae
gacgatgacggcgacgattc

SEQ ID NO: 52106 - DNA, 20 bp, Neisseria gonorrhoeae
acgatgacggcgacgattcc

SEQ ID NO: 52107 - DNA, 20 bp, Neisseria gonorrhoeae
cgtacaccaaaacagtcatg

SEQ ID NO: 52108 - DNA, 20 bp, Neisseria gonorrhoeae
ccgccatcacgagcgagcgc

SEQ ID NO: 52109 - DNA, 20 bp, Neisseria gonorrhoeae
tggtgtacggaatcgtcgcc

SEQ ID NO: 52110 - DNA, 20 bp, Neisseria gonorrhoeae
aaggttgccatgcccaacaa

SEQ ID NO: 52111 - DNA, 20 bp, Neisseria gonorrhoeae
ccatgcccaacaagcccgaa

SEQ ID NO: 52112 - DNA, 20 bp, Neisseria gonorrhoeae
ggctggcggaaaaggaaatt

SEQ ID NO: 52113 - DNA, 20 bp, Neisseria gonorrhoeae
gctggcggaaaaggaaattg

SEQ ID NO: 52114 - DNA, 20 bp, Neisseria gonorrhoeae
tgacaatttccttttccgcc

SEQ ID NO: 52115 - DNA, 20 bp, Neisseria gonorrhoeae
cgggtgggcatcacgcagtc

SEQ ID NO: 52116 - DNA, 20 bp, Neisseria gonorrhoeae
cggcgtgcctacgcccatca

SEQ ID NO: 52117 - DNA, 20 bp, Neisseria gonorrhoeae
cctgatgggcgtaggcacgc

SEQ ID NO: 52118 - DNA, 20 bp, Neisseria gonorrhoeae
gactgcgtgatgcccacccg

SEQ ID NO: 52119 - DNA, 20 bp, Neisseria gonorrhoeae
aagagggcttttattacgac

SEQ ID NO: 52120 - DNA, 20 bp, Neisseria gonorrhoeae
tattacgacatcgccacgga

SEQ ID NO: 52121 - DNA, 20 bp, Neisseria gonorrhoeae
attacgacatcgccacggaa

SEQ ID NO: 52122 - DNA, 20 bp, Neisseria gonorrhoeae
ttacgacatcgccacggaaa

SEQ ID NO: 52123 - DNA, 20 bp, Neisseria gonorrhoeae
cgacatcgccacggaaaaac

SEQ ID NO: 52124 - DNA, 20 bp, Neisseria gonorrhoeae
cccaaaatggaaggccgtca

SEQ ID NO: 52125 - DNA, 20 bp, Neisseria gonorrhoeae
ccaaaatggaaggccgtcaa

SEQ ID NO: 52126 - DNA, 20 bp, Neisseria gonorrhoeae
cgccgaagaaaaaataaagc

SEQ ID NO: 52127 - DNA, 20 bp, Neisseria gonorrhoeae
tagctttattttttcttcgg

SEQ ID NO: 52128 - DNA, 20 bp, Neisseria gonorrhoeae
attttttcttcggcgcaatc

SEQ ID NO: 52129 - DNA, 20 bp, Neisseria gonorrhoeae
tggattgccaaaattgagcg

SEQ ID NO: 52130 - DNA, 20 bp, Neisseria gonorrhoeae
ggattgccaaaattgagcgc

SEQ ID NO: 52131 - DNA, 20 bp, Neisseria gonorrhoeae
gattgccaaaattgagcgca

SEQ ID NO: 52132 - DNA, 20 bp, Neisseria gonorrhoeae
ccaaaattgagcgcaatatc

SEQ ID NO: 52133 - DNA, 20 bp, Neisseria gonorrhoeae
agcgcaatatccaaagggat

SEQ ID NO: 52134 - DNA, 20 bp, Neisseria gonorrhoeae
ccgacgacttctggctgtac

SEQ ID NO: 52135 - DNA, 20 bp, Neisseria gonorrhoeae
tggctgtacgacaccccggg

SEQ ID NO: 52136 - DNA, 20 bp, Neisseria gonorrhoeae
tagccgctttcttcgacgat

SEQ ID NO: 52137 - DNA, 20 bp, Neisseria gonorrhoeae
cttcgacgatgattttcggc

SEQ ID NO: 52138 - DNA, 20 bp, Neisseria gonorrhoeae
ttcgacgatgattttcggcc

SEQ ID NO: 52139 - DNA, 20 bp, Neisseria gonorrhoeae
gtccgcgtatttgcctgagg

SEQ ID NO: 52140 - DNA, 20 bp, Neisseria gonorrhoeae
tccgcgtatttgcctgaggg

SEQ ID NO: 52141 - DNA, 20 bp, Neisseria gonorrhoeae
gcctgaggggtagggcggcg

SEQ ID NO: 52142 - DNA, 20 bp, Neisseria gonorrhoeae
cctgaggggtagggcggcga

SEQ ID NO: 52143 - DNA, 20 bp, Neisseria gonorrhoeae
gtttcgggcaggcaggggct

SEQ ID NO: 52144 - DNA, 20 bp, Neisseria gonorrhoeae
cctgatccaaacggtgcttc

SEQ ID NO: 52145 - DNA, 20 bp, Neisseria gonorrhoeae
agacggcattccgagtccga

SEQ ID NO: 52146 - DNA, 20 bp, Neisseria gonorrhoeae
cgagtccgaagcatcttgtg

SEQ ID NO: 52147 - DNA, 20 bp, Neisseria gonorrhoeae
tgcggtttgaaaatcgggaa

SEQ ID NO: 52148 - DNA, 20 bp, Neisseria gonorrhoeae
gaaaatcgggaatctgatta

SEQ ID NO: 52149 - DNA, 20 bp, Neisseria gonorrhoeae
tgcccaatgcatgggtggcg

SEQ ID NO: 52150 - DNA, 20 bp, Neisseria gonorrhoeae
tcgctgctcatcaggctaag

SEQ ID NO: 52151 - DNA, 20 bp, Neisseria gonorrhoeae
cgctgctcatcaggctaagg

SEQ ID NO: 52152 - DNA, 20 bp, Neisseria gonorrhoeae
gctgctcatcaggctaaggt

SEQ ID NO: 52153 - DNA, 20 bp, Neisseria gonorrhoeae
cacgtaaagaactgctgcac

SEQ ID NO: 52154 - DNA, 20 bp, Neisseria gonorrhoeae
agacggcatttttttcaaat

SEQ ID NO: 52155 - DNA, 20 bp, Neisseria gonorrhoeae
ttttcaaatcaacgttcttt

SEQ ID NO: 52156 - DNA, 20 bp, Neisseria gonorrhoeae
tttcaaatcaacgttcttta

SEQ ID NO: 52157 - DNA, 20 bp, Neisseria gonorrhoeae
ttcaaatcaacgttctttac

SEQ ID NO: 52158 - DNA, 20 bp, Neisseria gonorrhoeae
tcaaatcaacgttctttacg

SEQ ID NO: 52159 - DNA, 20 bp, Neisseria gonorrhoeae
cggggcgtgggcttcgacca

SEQ ID NO: 52160 - DNA, 20 bp, Neisseria gonorrhoeae
gaccagcttttggtggtcgg

SEQ ID NO: 52161 - DNA, 20 bp, Neisseria gonorrhoeae
tggtggtcgggtgttcggaa

SEQ ID NO: 52162 - DNA, 20 bp, Neisseria gonorrhoeae
ggtggtcgggtgttcggaaa

SEQ ID NO: 52163 - DNA, 20 bp, Neisseria gonorrhoeae
gtggtcgggtgttcggaaac

SEQ ID NO: 52164 - DNA, 20 bp, Neisseria gonorrhoeae
ttgcagatttggcataatgc

SEQ ID NO: 52165 - DNA, 20 bp, Neisseria gonorrhoeae
tgcagatttggcataatgct

SEQ ID NO: 52166 - DNA, 20 bp, Neisseria gonorrhoeae
gcagatttggcataatgctt

SEQ ID NO: 52167 - DNA, 20 bp, Neisseria gonorrhoeae
cagatttggcataatgcttt

SEQ ID NO: 52168 - DNA, 20 bp, Neisseria gonorrhoeae
ggcataatgctttaatcgga

SEQ ID NO: 52169 - DNA, 20 bp, Neisseria gonorrhoeae
gggcaggctgcaggcggcaa

SEQ ID NO: 52170 - DNA, 20 bp, Neisseria gonorrhoeae
ggcaggctgcaggcggcaag

SEQ ID NO: 52171 - DNA, 20 bp, Neisseria gonorrhoeae
atgtcggcggttgtgggcgt

SEQ ID NO: 52172 - DNA, 20 bp, Neisseria gonorrhoeae
tgggcgtggcgatgattgcc

SEQ ID NO: 52173 - DNA, 20 bp, Neisseria gonorrhoeae
ccggtgcggaattcggctac

SEQ ID NO: 52174 - DNA, 20 bp, Neisseria gonorrhoeae
atgacgcagtccggtgcgaa

SEQ ID NO: 52175 - DNA, 20 bp, Neisseria gonorrhoeae
acggataagccaagccgttg

SEQ ID NO: 52176 - DNA, 20 bp, Neisseria gonorrhoeae
caaccgccgcgttgaccttg

SEQ ID NO: 52177 - DNA, 20 bp, Neisseria gonorrhoeae
caacggcttggcttatccgt

SEQ ID NO: 52178 - DNA, 20 bp, Neisseria gonorrhoeae
gcttatccgtcaattcgcac

SEQ ID NO: 52179 - DNA, 20 bp, Neisseria gonorrhoeae
gcgtatctgcgcgacagggg

SEQ ID NO: 52180 - DNA, 20 bp, Neisseria gonorrhoeae
ccattcgggcgcgccgctgt

SEQ ID NO: 52181 - DNA, 20 bp, Neisseria gonorrhoeae
cattcgggcgcgccgctgtt

SEQ ID NO: 52182 - DNA, 20 bp, Neisseria gonorrhoeae
gggcgcgccgctgtttcagg

SEQ ID NO: 52183 - DNA, 20 bp, Neisseria gonorrhoeae
ctcctgaaacagcggcgcgc

SEQ ID NO: 52184 - DNA, 20 bp, Neisseria gonorrhoeae
tattgtgctgctatttttgc

SEQ ID NO: 52185 - DNA, 20 bp, Neisseria gonorrhoeae
attgtgctgctatttttgcc

SEQ ID NO: 52186 - DNA, 20 bp, Neisseria gonorrhoeae
ttgtgctgctatttttgcca

SEQ ID NO: 52187 - DNA, 20 bp, Neisseria gonorrhoeae
tgctgctatttttgccaatg

SEQ ID NO: 52188 - DNA, 20 bp, Neisseria gonorrhoeae
ttgccaatgcctaccgtttt

SEQ ID NO: 52189 - DNA, 20 bp, Neisseria gonorrhoeae
tgcgcctgccggtttggaac

SEQ ID NO: 52190 - DNA, 20 bp, Neisseria gonorrhoeae
gcgcctgccggtttggaaca

SEQ ID NO: 52191 - DNA, 20 bp, Neisseria gonorrhoeae
cgcctgccggtttggaacag

SEQ ID NO: 52192 - DNA, 20 bp, Neisseria gonorrhoeae
ggaacagtctgcccgaaggt

SEQ ID NO: 52193 - DNA, 20 bp, Neisseria gonorrhoeae
gaacagtctgcccgaaggtg

SEQ ID NO: 52194 - DNA, 20 bp, Neisseria gonorrhoeae
cgaaccggcaaacgaaaaca

SEQ ID NO: 52195 - DNA, 20 bp, Neisseria gonorrhoeae
cgaaccggctgccgcatcgg

SEQ ID NO: 52196 - DNA, 20 bp, Neisseria gonorrhoeae
acatccgatgcggcagccgg

SEQ ID NO: 52197 - DNA, 20 bp, Neisseria gonorrhoeae
ggaagctgtgttttcgtttg

SEQ ID NO: 52198 - DNA, 20 bp, Neisseria gonorrhoeae
tcgtttgccggttcggaagc

SEQ ID NO: 52199 - DNA, 20 bp, Neisseria gonorrhoeae
aaccggcgcgattacgaagc

SEQ ID NO: 52200 - DNA, 20 bp, Neisseria gonorrhoeae
cgaagcggcggaagccaatc

SEQ ID NO: 52201 - DNA, 20 bp, Neisseria gonorrhoeae
atgcggcggcgaagatgaat

SEQ ID NO: 52202 - DNA, 20 bp, Neisseria gonorrhoeae
cgcgcctcgtgcgtctgcaa

SEQ ID NO: 52203 - DNA, 20 bp, Neisseria gonorrhoeae
cagacgcacgaggcgcgtaa

SEQ ID NO: 52204 - DNA, 20 bp, Neisseria gonorrhoeae
ggggtaaggcaaaaggctac

SEQ ID NO: 52205 - DNA, 20 bp, Neisseria gonorrhoeae
gggtaaggcaaaaggctacc

SEQ ID NO: 52206 - DNA, 20 bp, Neisseria gonorrhoeae
aagcgagtattgcactgaag

SEQ ID NO: 52207 - DNA, 20 bp, Neisseria gonorrhoeae
cactgaagccgagtattccg

SEQ ID NO: 52208 - DNA, 20 bp, Neisseria gonorrhoeae
cggcgcgtttggtgttggca

SEQ ID NO: 52209 - DNA, 20 bp, Neisseria gonorrhoeae
aacctcggacacggcatcaa

SEQ ID NO: 52210 - DNA, 20 bp, Neisseria gonorrhoeae
gtcgacaccgtgcacgagct

SEQ ID NO: 52211 - DNA, 20 bp, Neisseria gonorrhoeae
tggcgtgttcggggtcggcg

SEQ ID NO: 52212 - DNA, 20 bp, Neisseria gonorrhoeae
ggcgtgttcggggtcggcgt

SEQ ID NO: 52213 - DNA, 20 bp, Neisseria gonorrhoeae
gcgtgttcggggtcggcgtg

SEQ ID NO: 52214 - DNA, 20 bp, Neisseria gonorrhoeae
tacgatgacatcgccgatat

SEQ ID NO: 52215 - DNA, 20 bp, Neisseria gonorrhoeae
ttacggaaactttcgcaagc

SEQ ID NO: 52216 - DNA, 20 bp, Neisseria gonorrhoeae
tacggaaactttcgcaagcc

SEQ ID NO: 52217 - DNA, 20 bp, Neisseria gonorrhoeae
acggaaactttcgcaagccc

SEQ ID NO: 52218 - DNA, 20 bp, Neisseria gonorrhoeae
cggaaactttcgcaagccca

SEQ ID NO: 52219 - DNA, 20 bp, Neisseria gonorrhoeae
caatcttgggcggcggacgc

SEQ ID NO: 52220 - DNA, 20 bp, Neisseria gonorrhoeae
ggcggcggacgcttcgaccg

SEQ ID NO: 52221 - DNA, 20 bp, Neisseria gonorrhoeae
gaccgtccaatccctctccg

SEQ ID NO: 52222 - DNA, 20 bp, Neisseria gonorrhoeae
ccgctgccgaagtgccgcgc

SEQ ID NO: 52223 - DNA, 20 bp, Neisseria gonorrhoeae
ggcagcggtaacggcggaga

SEQ ID NO: 52224 - DNA, 20 bp, Neisseria gonorrhoeae
tccgcgcagtttgaagtagc

SEQ ID NO: 52225 - DNA, 20 bp, Neisseria gonorrhoeae
gaagtagcgcgcggcggcaa

SEQ ID NO: 52226 - DNA, 20 bp, Neisseria gonorrhoeae
aagtagcgcgcggcggcaac

SEQ ID NO: 52227 - DNA, 20 bp, Neisseria gonorrhoeae
ccttcaggcactgatttacg

SEQ ID NO: 52228 - DNA, 20 bp, Neisseria gonorrhoeae
aggcactgatttacgccgtt

SEQ ID NO: 52229 - DNA, 20 bp, Neisseria gonorrhoeae
cgtttgagcatcgttatgcc

SEQ ID NO: 52230 - DNA, 20 bp, Neisseria gonorrhoeae
gagcatcgttatgccgtctt

SEQ ID NO: 52231 - DNA, 20 bp, Neisseria gonorrhoeae
agcatcgttatgccgtcttt

SEQ ID NO: 52232 - DNA, 20 bp, Neisseria gonorrhoeae
tgccgtctttttcacacgca

SEQ ID NO: 52233 - DNA, 20 bp, Neisseria gonorrhoeae
ttcacacgcataggtacggc

SEQ ID NO: 52234 - DNA, 20 bp, Neisseria gonorrhoeae
gcggattgtttcatcgcctt

SEQ ID NO: 52235 - DNA, 20 bp, Neisseria gonorrhoeae
tttcatcgccttgcgggttt

SEQ ID NO: 52236 - DNA, 20 bp, Neisseria gonorrhoeae
catcgccttgcgggttttcc

SEQ ID NO: 52237 - DNA, 20 bp, Neisseria gonorrhoeae
atcgccttgcgggttttccg

SEQ ID NO: 52238 - DNA, 20 bp, Neisseria gonorrhoeae
cgggttttccgtgccgtcga

SEQ ID NO: 52239 - DNA, 20 bp, Neisseria gonorrhoeae
gttgacggctgcgaagtaga

SEQ ID NO: 52240 - DNA, 20 bp, Neisseria gonorrhoeae
acggctgcgaagtagagcat

SEQ ID NO: 52241 - DNA, 20 bp, Neisseria gonorrhoeae
agtacgccgataccgctgtc

SEQ ID NO: 52242 - DNA, 20 bp, Neisseria gonorrhoeae
ccactcctatgctctacttc

SEQ ID NO: 52243 - DNA, 20 bp, Neisseria gonorrhoeae
gcagccgtcaacgaatgcgg

SEQ ID NO: 52244 - DNA, 20 bp, Neisseria gonorrhoeae
ttcgggcagccccatctgca

SEQ ID NO: 52245 - DNA, 20 bp, Neisseria gonorrhoeae
gggcagccccatctgcatag

SEQ ID NO: 52246 - DNA, 20 bp, Neisseria gonorrhoeae
tctccggcatcgctatgcag

SEQ ID NO: 52247 - DNA, 20 bp, Neisseria gonorrhoeae
ctccggcatcgctatgcaga

SEQ ID NO: 52248 - DNA, 20 bp, Neisseria gonorrhoeae
tccggcatcgctatgcagat

SEQ ID NO: 52249 - DNA, 20 bp, Neisseria gonorrhoeae
gaaatgccgaaggcggtttt

SEQ ID NO: 52250 - DNA, 20 bp, Neisseria gonorrhoeae
tgattttggagccgaatatc

SEQ ID NO: 52251 - DNA, 20 bp, Neisseria gonorrhoeae
gattttggagccgaatatcc

SEQ ID NO: 52252 - DNA, 20 bp, Neisseria gonorrhoeae
attttggagccgaatatcca

SEQ ID NO: 52253 - DNA, 20 bp, Neisseria gonorrhoeae
tggagccgaatatccacgcg

SEQ ID NO: 52254 - DNA, 20 bp, Neisseria gonorrhoeae
ctcgcctgacgatgacggtt

SEQ ID NO: 52255 - DNA, 20 bp, Neisseria gonorrhoeae
atctgcccgccgagcagaaa

SEQ ID NO: 52256 - DNA, 20 bp, Neisseria gonorrhoeae
tctgcccgccgagcagaaag

SEQ ID NO: 52257 - DNA, 20 bp, Neisseria gonorrhoeae
ctgctcggcgggcagataaa

SEQ ID NO: 52258 - DNA, 20 bp, Neisseria gonorrhoeae
tgctcggcgggcagataaac

SEQ ID NO: 52259 - DNA, 20 bp, Neisseria gonorrhoeae
gtccgatgcgcgggaacgca

SEQ ID NO: 52260 - DNA, 20 bp, Neisseria gonorrhoeae
ccgcgcatcggacgaattgg

SEQ ID NO: 52261 - DNA, 20 bp, Neisseria gonorrhoeae
gcacggattttcggcacgca

SEQ ID NO: 52262 - DNA, 20 bp, Neisseria gonorrhoeae
tcggcacgcaggcaggcatc

SEQ ID NO: 52263 - DNA, 20 bp, Neisseria gonorrhoeae
cggcacgcaggcaggcatcg

SEQ ID NO: 52264 - DNA, 20 bp, Neisseria gonorrhoeae
ggaacgccgttgtcgagcag

SEQ ID NO: 52265 - DNA, 20 bp, Neisseria gonorrhoeae
tcgagcaggtgttgttcggc

SEQ ID NO: 52266 - DNA, 20 bp, Neisseria gonorrhoeae
ttcggcggcaaggatttgtc

SEQ ID NO: 52267 - DNA, 20 bp, Neisseria gonorrhoeae
ggcggcaaggatttgtcggg

SEQ ID NO: 52268 - DNA, 20 bp, Neisseria gonorrhoeae
gtcgggcggactcggtttgc

SEQ ID NO: 52269 - DNA, 20 bp, Neisseria gonorrhoeae
atgtcgtccgaagtcaggct

SEQ ID NO: 52270 - DNA, 20 bp, Neisseria gonorrhoeae
tatggcggcgacgcggctgc

SEQ ID NO: 52271 - DNA, 20 bp, Neisseria gonorrhoeae
atggcggcgacgcggctgcc

SEQ ID NO: 52272 - DNA, 20 bp, Neisseria gonorrhoeae
tggcggcgacgcggctgccg

SEQ ID NO: 52273 - DNA, 20 bp, Neisseria gonorrhoeae
tgtgccagcggcaggccgag

SEQ ID NO: 52274 - DNA, 20 bp, Neisseria gonorrhoeae
gaccgaaccgtcgggctgcg

SEQ ID NO: 52275 - DNA, 20 bp, Neisseria gonorrhoeae
accgaaccgtcgggctgcgg

SEQ ID NO: 52276 - DNA, 20 bp, Neisseria gonorrhoeae
cagcggcatcccgatatgcc

SEQ ID NO: 52277 - DNA, 20 bp, Neisseria gonorrhoeae
ggtcaaactcgccgccggct

SEQ ID NO: 52278 - DNA, 20 bp, Neisseria gonorrhoeae
gtcggcgtgtttaagcgcga

SEQ ID NO: 52279 - DNA, 20 bp, Neisseria gonorrhoeae
aagcgcgataaaggcccggg

SEQ ID NO: 52280 - DNA, 20 bp, Neisseria gonorrhoeae
agcgcgataaaggcccgggc

SEQ ID NO: 52281 - DNA, 20 bp, Neisseria gonorrhoeae
atcgcgcttaaacacgccga

SEQ ID NO: 52282 - DNA, 20 bp, Neisseria gonorrhoeae
tcgcgcttaaacacgccgac

SEQ ID NO: 52283 - DNA, 20 bp, Neisseria gonorrhoeae
agtttcgacttacgcagctt

SEQ ID NO: 52284 - DNA, 20 bp, Neisseria gonorrhoeae
cgacttacgcagctttatcg

SEQ ID NO: 52285 - DNA, 20 bp, Neisseria gonorrhoeae
gacttacgcagctttatcgg

SEQ ID NO: 52286 - DNA, 20 bp, Neisseria gonorrhoeae
cgcagctttatcgggcgttt

SEQ ID NO: 52287 - DNA, 20 bp, Neisseria gonorrhoeae
atcgggcgtttgcccgccgt

SEQ ID NO: 52288 - DNA, 20 bp, Neisseria gonorrhoeae
gattgcttcatcggttcggg

SEQ ID NO: 52289 - DNA, 20 bp, Neisseria gonorrhoeae
cttcatcggttcgggcgttg

SEQ ID NO: 52290 - DNA, 20 bp, Neisseria gonorrhoeae
atcggttcgggcgttgtcgt

SEQ ID NO: 52291 - DNA, 20 bp, Neisseria gonorrhoeae
gggcgttgtcgtttcccccg

SEQ ID NO: 52292 - DNA, 20 bp, Neisseria gonorrhoeae
tcgtttcccccgaagccctg

SEQ ID NO: 52293 - DNA, 20 bp, Neisseria gonorrhoeae
gtcttcgtaggcagggccga

SEQ ID NO: 52294 - DNA, 20 bp, Neisseria gonorrhoeae
tcttcgtaggcagggccgat

SEQ ID NO: 52295 - DNA, 20 bp, Neisseria gonorrhoeae
gtaggcagggccgatgccgc

SEQ ID NO: 52296 - DNA, 20 bp, Neisseria gonorrhoeae
tgcctttgccgcgcgatgct

SEQ ID NO: 52297 - DNA, 20 bp, Neisseria gonorrhoeae
gcctttgccgcgcgatgctt

SEQ ID NO: 52298 - DNA, 20 bp, Neisseria gonorrhoeae
ccgacgtgcgccatttcgtg

SEQ ID NO: 52299 - DNA, 20 bp, Neisseria gonorrhoeae
cgtgcgccaacacggcttcc

SEQ ID NO: 52300 - DNA, 20 bp, Neisseria gonorrhoeae
gtgcgccaacacggcttcca

SEQ ID NO: 52301 - DNA, 20 bp, Neisseria gonorrhoeae
cacttcgtcgcgcgtcatat

SEQ ID NO: 52302 - DNA, 20 bp, Neisseria gonorrhoeae
gtcgcgcgtcatatggtcga

SEQ ID NO: 52303 - DNA, 20 bp, Neisseria gonorrhoeae
tgacacccgccgaagccttg

SEQ ID NO: 52304 - DNA, 20 bp, Neisseria gonorrhoeae
gcggcgggttcgacttatct

SEQ ID NO: 52305 - DNA, 20 bp, Neisseria gonorrhoeae
gacttatctggtgatgggcc

SEQ ID NO: 52306 - DNA, 20 bp, Neisseria gonorrhoeae
tctggtgatgggccgccccg

SEQ ID NO: 52307 - DNA, 20 bp, Neisseria gonorrhoeae
cccgagccgccgatccggtc

SEQ ID NO: 52308 - DNA, 20 bp, Neisseria gonorrhoeae
acggcaaaggcgaaatcttc

SEQ ID NO: 52309 - DNA, 20 bp, Neisseria gonorrhoeae
cggcaaaggcgaaatcttcc

SEQ ID NO: 52310 - DNA, 20 bp, Neisseria gonorrhoeae
cgcgaagagcgcgaactcga

SEQ ID NO: 52311 - DNA, 20 bp, Neisseria gonorrhoeae
atgtgtacggctactccaaa

SEQ ID NO: 52312 - DNA, 20 bp, Neisseria gonorrhoeae
ggagtagccgtacacattaa

SEQ ID NO: 52313 - DNA, 20 bp, Neisseria gonorrhoeae
ggcggcggcttcgagtgcgc

SEQ ID NO: 52314 - DNA, 20 bp, Neisseria gonorrhoeae
gagtgcgccttgcgtgtagc

SEQ ID NO: 52315 - DNA, 20 bp, Neisseria gonorrhoeae
cgtgtagcggacttggtgga

SEQ ID NO: 52316 - DNA, 20 bp, Neisseria gonorrhoeae
gtggaaggcttcgaacatcg

SEQ ID NO: 52317 - DNA, 20 bp, Neisseria gonorrhoeae
gaacatcggtttcaagccgc

SEQ ID NO: 52318 - DNA, 20 bp, Neisseria gonorrhoeae
ggtatgcaccatcgcccgct

SEQ ID NO: 52319 - DNA, 20 bp, Neisseria gonorrhoeae
gaagccgagcgtgggccggg

SEQ ID NO: 52320 - DNA, 20 bp, Neisseria gonorrhoeae
cgaccgtgtctaaaaggtgg

SEQ ID NO: 52321 - DNA, 20 bp, Neisseria gonorrhoeae
gaccgtgtctaaaaggtggt

SEQ ID NO: 52322 - DNA, 20 bp, Neisseria gonorrhoeae
ccgaccaccttttagacacg

SEQ ID NO: 52323 - DNA, 20 bp, Neisseria gonorrhoeae
acaaagaccaaatccgcgcc

SEQ ID NO: 52324 - DNA, 20 bp, Neisseria gonorrhoeae
ggtgtggttgccgaagacaa

SEQ ID NO: 52325 - DNA, 20 bp, Neisseria gonorrhoeae
ccgaagacaatgcccaattg

SEQ ID NO: 52326 - DNA, 20 bp, Neisseria gonorrhoeae
gaaaagggcagcctggtgat

SEQ ID NO: 52327 - DNA, 20 bp, Neisseria gonorrhoeae
cccgcccatcatcaccaggc

SEQ ID NO: 52328 - DNA, 20 bp, Neisseria gonorrhoeae
gaaacggatgcgttcgggca

SEQ ID NO: 52329 - DNA, 20 bp, Neisseria gonorrhoeae
aaacggatgcgttcgggcaa

SEQ ID NO: 52330 - DNA, 20 bp, Neisseria gonorrhoeae
gggcaaaatgcgccccggca

SEQ ID NO: 52331 - DNA, 20 bp, Neisseria gonorrhoeae
tttgaagtggcgcggcgcga

SEQ ID NO: 52332 - DNA, 20 bp, Neisseria gonorrhoeae
gaagtggcgcggcgcgattg

SEQ ID NO: 52333 - DNA, 20 bp, Neisseria gonorrhoeae
ttgccagccgcctcaaagac

SEQ ID NO: 52334 - DNA, 20 bp, Neisseria gonorrhoeae
ccagccgcctcaaagaccgt

SEQ ID NO: 52335 - DNA, 20 bp, Neisseria gonorrhoeae
ttaccgtccgaccatcgtgt

SEQ ID NO: 52336 - DNA, 20 bp, Neisseria gonorrhoeae
taccgtccgaccatcgtgtt

SEQ ID NO: 52337 - DNA, 20 bp, Neisseria gonorrhoeae
accgtccgaccatcgtgttt

SEQ ID NO: 52338 - DNA, 20 bp, Neisseria gonorrhoeae
gggggcagggctttgcgccg

SEQ ID NO: 52339 - DNA, 20 bp, Neisseria gonorrhoeae
ggggcagggctttgcgccgc

SEQ ID NO: 52340 - DNA, 20 bp, Neisseria gonorrhoeae
gcgccgccgagctttaccga

SEQ ID NO: 52341 - DNA, 20 bp, Neisseria gonorrhoeae
cgccgccgagctttaccgac

SEQ ID NO: 52342 - DNA, 20 bp, Neisseria gonorrhoeae
accgacgagttccacgtcgt

SEQ ID NO: 52343 - DNA, 20 bp, Neisseria gonorrhoeae
cggggcttcgggatgttggg

SEQ ID NO: 52344 - DNA, 20 bp, Neisseria gonorrhoeae
gggatgttgggcgcgggcat

SEQ ID NO: 52345 - DNA, 20 bp, Neisseria gonorrhoeae
ggcgcgggcatagtcgatga

SEQ ID NO: 52346 - DNA, 20 bp, Neisseria gonorrhoeae
gccttatccggcttttcctt

SEQ ID NO: 52347 - DNA, 20 bp, Neisseria gonorrhoeae
ccttatccggcttttccttc

SEQ ID NO: 52348 - DNA, 20 bp, Neisseria gonorrhoeae
atgtccacggcggtttggcg

SEQ ID NO: 52349 - DNA, 20 bp, Neisseria gonorrhoeae
ggcgcgtgtcgggcaggtag

SEQ ID NO: 52350 - DNA, 20 bp, Neisseria gonorrhoeae
gcgcgtgtcgggcaggtagg

SEQ ID NO: 52351 - DNA, 20 bp, Neisseria gonorrhoeae
ggcggcggttcgtttgcacg

SEQ ID NO: 52352 - DNA, 20 bp, Neisseria gonorrhoeae
gtttgcacgctggacagaca

SEQ ID NO: 52353 - DNA, 20 bp, Neisseria gonorrhoeae
ctgcaaatgcgcggaattcc

SEQ ID NO: 52354 - DNA, 20 bp, Neisseria gonorrhoeae
tgcaaatgcgcggaattccg

SEQ ID NO: 52355 - DNA, 20 bp, Neisseria gonorrhoeae
cggtctgtgcccacatcggt

SEQ ID NO: 52356 - DNA, 20 bp, Neisseria gonorrhoeae
gccttcggcggatataaagt

SEQ ID NO: 52357 - DNA, 20 bp, Neisseria gonorrhoeae
atatccgccgaaggcaaaca

SEQ ID NO: 52358 - DNA, 20 bp, Neisseria gonorrhoeae
acgctgttgggcggtgaaac

SEQ ID NO: 52359 - DNA, 20 bp, Neisseria gonorrhoeae
cgctgttgggcggtgaaacg

SEQ ID NO: 52360 - DNA, 20 bp, Neisseria gonorrhoeae
ggcggtgaaacggctttgca

SEQ ID NO: 52361 - DNA, 20 bp, Neisseria gonorrhoeae
gcagaaagggcaggcgggaa

SEQ ID NO: 52362 - DNA, 20 bp, Neisseria gonorrhoeae
cagaaagggcaggcgggaac

SEQ ID NO: 52363 - DNA, 20 bp, Neisseria gonorrhoeae
aaaaaagtgtccgcgccgga

SEQ ID NO: 52364 - DNA, 20 bp, Neisseria gonorrhoeae
gacaaaggcgtgctggcggc

SEQ ID NO: 52365 - DNA, 20 bp, Neisseria gonorrhoeae
ggcagccgccgcagccgcca

SEQ ID NO: 52366 - DNA, 20 bp, Neisseria gonorrhoeae
gtcgaacaggtattccggcg

SEQ ID NO: 52367 - DNA, 20 bp, Neisseria gonorrhoeae
tcgaacaggtattccggcgc

SEQ ID NO: 52368 - DNA, 20 bp, Neisseria gonorrhoeae
taaattgtgtgagtgtttca

SEQ ID NO: 52369 - DNA, 20 bp, Neisseria gonorrhoeae
tgtgagtgtttcagcctgcc

SEQ ID NO: 52370 - DNA, 20 bp, Neisseria gonorrhoeae
cagcctgccgattatacgct

SEQ ID NO: 52371 - DNA, 20 bp, Neisseria gonorrhoeae
agcctgccgattatacgctt

SEQ ID NO: 52372 - DNA, 20 bp, Neisseria gonorrhoeae
tacgcttagggtgtctgatc

SEQ ID NO: 52373 - DNA, 20 bp, Neisseria gonorrhoeae
tttgcgcactttggcatcca

SEQ ID NO: 52374 - DNA, 20 bp, Neisseria gonorrhoeae
gcgcactttggcatccagcg

SEQ ID NO: 52375 - DNA, 20 bp, Neisseria gonorrhoeae
cgcactttggcatccagcgc

SEQ ID NO: 52376 - DNA, 20 bp, Neisseria gonorrhoeae
ggcatccagcgcgccgaagg

SEQ ID NO: 52377 - DNA, 20 bp, Neisseria gonorrhoeae
gcatccagcgcgccgaaggg

SEQ ID NO: 52378 - DNA, 20 bp, Neisseria gonorrhoeae
ccggcagcagcacgcggcgg

SEQ ID NO: 52379 - DNA, 20 bp, Neisseria gonorrhoeae
cggcagcagcacgcggcgga

SEQ ID NO: 52380 - DNA, 20 bp, Neisseria gonorrhoeae
tgaaacggtttgcgcccaaa

SEQ ID NO: 52381 - DNA, 20 bp, Neisseria gonorrhoeae
gcgcccaaagtcgccgccgc

SEQ ID NO: 52382 - DNA, 20 bp, Neisseria gonorrhoeae
cgcccaaagtcgccgccgct

SEQ ID NO: 52383 - DNA, 20 bp, Neisseria gonorrhoeae
ccacacgtcgcaagtcaaga

SEQ ID NO: 52384 - DNA, 20 bp, Neisseria gonorrhoeae
tcagtggtcagcggagttgc

SEQ ID NO: 52385 - DNA, 20 bp, Neisseria gonorrhoeae
cagtggtcagcggagttgcc

SEQ ID NO: 52386 - DNA, 20 bp, Neisseria gonorrhoeae
agtggtcagcggagttgccg

SEQ ID NO: 52387 - DNA, 20 bp, Neisseria gonorrhoeae
ccgcgttggaagtggaaacc

SEQ ID NO: 52388 - DNA, 20 bp, Neisseria gonorrhoeae
gctttcggcgacaaaaacga

SEQ ID NO: 52389 - DNA, 20 bp, Neisseria gonorrhoeae
cggcgacaaaaacgacaata

SEQ ID NO: 52390 - DNA, 20 bp, Neisseria gonorrhoeae
ggcgacaaaaacgacaataa

SEQ ID NO: 52391 - DNA, 20 bp, Neisseria gonorrhoeae
tgcggatgtttttctccgta

SEQ ID NO: 52392 - DNA, 20 bp, Neisseria gonorrhoeae
ttctccgtaacgtggtattg

SEQ ID NO: 52393 - DNA, 20 bp, Neisseria gonorrhoeae
tctttttgcgcttttgaccg

SEQ ID NO: 52394 - DNA, 20 bp, Neisseria gonorrhoeae
ctttttgcgcttttgaccgg

SEQ ID NO: 52395 - DNA, 20 bp, Neisseria gonorrhoeae
tttttgcgcttttgaccggg

SEQ ID NO: 52396 - DNA, 20 bp, Neisseria gonorrhoeae
ttgcgcttttgaccgggcgg

SEQ ID NO: 52397 - DNA, 20 bp, Neisseria gonorrhoeae
tgcgcttttgaccgggcgga

SEQ ID NO: 52398 - DNA, 20 bp, Neisseria gonorrhoeae
tccggatgtttcggggtgta

SEQ ID NO: 52399 - DNA, 20 bp, Neisseria gonorrhoeae
cggggtgtagctcttcatct

SEQ ID NO: 52400 - DNA, 20 bp, Neisseria gonorrhoeae
ggggtgtagctcttcatctt

SEQ ID NO: 52401 - DNA, 20 bp, Neisseria gonorrhoeae
atcttgttgctgatggcgga

SEQ ID NO: 52402 - DNA, 20 bp, Neisseria gonorrhoeae
ttgctgatggcggaaatgtt

SEQ ID NO: 52403 - DNA, 20 bp, Neisseria gonorrhoeae
tttaccctccggcacttccg

SEQ ID NO: 52404 - DNA, 20 bp, Neisseria gonorrhoeae
accctccggcacttccgcat

SEQ ID NO: 52405 - DNA, 20 bp, Neisseria gonorrhoeae
ccctccggcacttccgcatc

SEQ ID NO: 52406 - DNA, 20 bp, Neisseria gonorrhoeae
cgcatcgccgtgcacccgcc

SEQ ID NO: 52407 - DNA, 20 bp, Neisseria gonorrhoeae
ttcttccgcattcaggtgcc

SEQ ID NO: 52408 - DNA, 20 bp, Neisseria gonorrhoeae
tctgcggctaaaatctacaa

SEQ ID NO: 52409 - DNA, 20 bp, Neisseria gonorrhoeae
ctatgcccgctatgaatttg

SEQ ID NO: 52410 - DNA, 20 bp, Neisseria gonorrhoeae
atagcgggcataggaatgcc

SEQ ID NO: 52411 - DNA, 20 bp, Neisseria gonorrhoeae
ttgtagattttagccgcaga

SEQ ID NO: 52412 - DNA, 20 bp, Neisseria gonorrhoeae
tgtagattttagccgcagat

SEQ ID NO: 52413 - DNA, 20 bp, Neisseria gonorrhoeae
caaaccgctggtgcgagatg

SEQ ID NO: 52414 - DNA, 20 bp, Neisseria gonorrhoeae
ccgtttggcgccgccgttcc

SEQ ID NO: 52415 - DNA, 20 bp, Neisseria gonorrhoeae
ggcgccgccgttcccagcat

SEQ ID NO: 52416 - DNA, 20 bp, Neisseria gonorrhoeae
gcgccgccgttcccagcatc

SEQ ID NO: 52417 - DNA, 20 bp, Neisseria gonorrhoeae
ccagcatctcgcaccagcgg

SEQ ID NO: 52418 - DNA, 20 bp, Neisseria gonorrhoeae
gcggcagtcggcaaagacgc

SEQ ID NO: 52419 - DNA, 20 bp, Neisseria gonorrhoeae
ggccagaccgttgaggattt

SEQ ID NO: 52420 - DNA, 20 bp, Neisseria gonorrhoeae
gtttcacgctttaccgcgtc

SEQ ID NO: 52421 - DNA, 20 bp, Neisseria gonorrhoeae
cacgctttaccgcgtctttg

SEQ ID NO: 52422 - DNA, 20 bp, Neisseria gonorrhoeae
acgctttaccgcgtctttgc

SEQ ID NO: 52423 - DNA, 20 bp, Neisseria gonorrhoeae
tcctgccttaccccgtatcg

SEQ ID NO: 52424 - DNA, 20 bp, Neisseria gonorrhoeae
ccccgtatcggcaaaccgtt

SEQ ID NO: 52425 - DNA, 20 bp, Neisseria gonorrhoeae
ttggcggatttggcgcaaca

SEQ ID NO: 52426 - DNA, 20 bp, Neisseria gonorrhoeae
gcggatttggcgcaacaggg

SEQ ID NO: 52427 - DNA, 20 bp, Neisseria gonorrhoeae
ggcgcaacagggcggtcagg

SEQ ID NO: 52428 - DNA, 20 bp, Neisseria gonorrhoeae
ccaaagccaacaaagacggc

SEQ ID NO: 52429 - DNA, 20 bp, Neisseria gonorrhoeae
ggacaacgccctgaaggttg

SEQ ID NO: 52430 - DNA, 20 bp, Neisseria gonorrhoeae
gacaacgccctgaaggttgc

SEQ ID NO: 52431 - DNA, 20 bp, Neisseria gonorrhoeae
cgctggacgcgcttcaaggc

SEQ ID NO: 52432 - DNA, 20 bp, Neisseria gonorrhoeae
aagcgcgtccagcgcaacct

SEQ ID NO: 52433 - DNA, 20 bp, Neisseria gonorrhoeae
cgttcggcatcggtgcgaag

SEQ ID NO: 52434 - DNA, 20 bp, Neisseria gonorrhoeae
gttcggcatcggtgcgaagt

SEQ ID NO: 52435 - DNA, 20 bp, Neisseria gonorrhoeae
ggcatcggtgcgaagtcgca

SEQ ID NO: 52436 - DNA, 20 bp, Neisseria gonorrhoeae
gcaggctgaaatcaggcggc

SEQ ID NO: 52437 - DNA, 20 bp, Neisseria gonorrhoeae
caggctgaaatcaggcggcg

SEQ ID NO: 52438 - DNA, 20 bp, Neisseria gonorrhoeae
cccgcgccgcaacccgccct

SEQ ID NO: 52439 - DNA, 20 bp, Neisseria gonorrhoeae
ggatggcccgcgcgccgtag

SEQ ID NO: 52440 - DNA, 20 bp, Neisseria gonorrhoeae
gatggcccgcgcgccgtagc

SEQ ID NO: 52441 - DNA, 20 bp, Neisseria gonorrhoeae
ccgcttatgggcagggcggg

SEQ ID NO: 52442 - DNA, 20 bp, Neisseria gonorrhoeae
tgggcagggcgggttgcggc

SEQ ID NO: 52443 - DNA, 20 bp, Neisseria gonorrhoeae
ctccaaaggaagttagaatg

SEQ ID NO: 52444 - DNA, 20 bp, Neisseria gonorrhoeae
tccaaaggaagttagaatga

SEQ ID NO: 52445 - DNA, 20 bp, Neisseria gonorrhoeae
gaatgaaatggcactagggc

SEQ ID NO: 52446 - DNA, 20 bp, Neisseria gonorrhoeae
gacgatgttgaaacatcagt

SEQ ID NO: 52447 - DNA, 20 bp, Neisseria gonorrhoeae
aaacatcagtaattcgcagt

SEQ ID NO: 52448 - DNA, 20 bp, Neisseria gonorrhoeae
ggcggctgcatcatcattga

SEQ ID NO: 52449 - DNA, 20 bp, Neisseria gonorrhoeae
acgacccgcacaaagcagat

SEQ ID NO: 52450 - DNA, 20 bp, Neisseria gonorrhoeae
tgaaaccagtcgatgacgtt

SEQ ID NO: 52451 - DNA, 20 bp, Neisseria gonorrhoeae
gaaaccagtcgatgacgttc

SEQ ID NO: 52452 - DNA, 20 bp, Neisseria gonorrhoeae
aaaccagtcgatgacgttct

SEQ ID NO: 52453 - DNA, 20 bp, Neisseria gonorrhoeae
caaacggcttggattttggc

SEQ ID NO: 52454 - DNA, 20 bp, Neisseria gonorrhoeae
gattttggcgattggtcggg

SEQ ID NO: 52455 - DNA, 20 bp, Neisseria gonorrhoeae
tggcgattggtcgggattgt

SEQ ID NO: 52456 - DNA, 20 bp, Neisseria gonorrhoeae
ggcgattggtcgggattgtc

SEQ ID NO: 52457 - DNA, 20 bp, Neisseria gonorrhoeae
gcgattggtcgggattgtcc

SEQ ID NO: 52458 - DNA, 20 bp, Neisseria gonorrhoeae
cggcaacgcacgcgcccgaa

SEQ ID NO: 52459 - DNA, 20 bp, Neisseria gonorrhoeae
ggcaacgcacgcgcccgaac

SEQ ID NO: 52460 - DNA, 20 bp, Neisseria gonorrhoeae
cccgaacggaaacggcgatg

SEQ ID NO: 52461 - DNA, 20 bp, Neisseria gonorrhoeae
cttcccagcctatcaggttg

SEQ ID NO: 52462 - DNA, 20 bp, Neisseria gonorrhoeae
ccagcctatcaggttgccca

SEQ ID NO: 52463 - DNA, 20 bp, Neisseria gonorrhoeae
aaatcaacgtggaagacgac

SEQ ID NO: 52464 - DNA, 20 bp, Neisseria gonorrhoeae
ttcggggcgcatatcgttga

SEQ ID NO: 52465 - DNA, 20 bp, Neisseria gonorrhoeae
tcggggcgcatatcgttgac

SEQ ID NO: 52466 - DNA, 20 bp, Neisseria gonorrhoeae
cggggcgcatatcgttgacc

SEQ ID NO: 52467 - DNA, 20 bp, Neisseria gonorrhoeae
ggggcgcatatcgttgaccc

SEQ ID NO: 52468 - DNA, 20 bp, Neisseria gonorrhoeae
cgtttccggtattgaggcag

SEQ ID NO: 52469 - DNA, 20 bp, Neisseria gonorrhoeae
ccggtattgaggcaggcaaa

SEQ ID NO: 52470 - DNA, 20 bp, Neisseria gonorrhoeae
cggtattgaggcaggcaaaa

SEQ ID NO: 52471 - DNA, 20 bp, Neisseria gonorrhoeae
aggcaggcaaaaaagtaacc

SEQ ID NO: 52472 - DNA, 20 bp, Neisseria gonorrhoeae
cggctgttcgcggcgcggtt

SEQ ID NO: 52473 - DNA, 20 bp, Neisseria gonorrhoeae
ttcagccttttcggcttcgg

SEQ ID NO: 52474 - DNA, 20 bp, Neisseria gonorrhoeae
agccttttcggcttcggcag

SEQ ID NO: 52475 - DNA, 20 bp, Neisseria gonorrhoeae
tcggcttcggcaggttcggc

SEQ ID NO: 52476 - DNA, 20 bp, Neisseria gonorrhoeae
cggcttcggcaggttcggct

SEQ ID NO: 52477 - DNA, 20 bp, Neisseria gonorrhoeae
ggcttcggcaggttcggctt

SEQ ID NO: 52478 - DNA, 20 bp, Neisseria gonorrhoeae
acggcgtgtcggcggcggcg

SEQ ID NO: 52479 - DNA, 20 bp, Neisseria gonorrhoeae
tgtcgggcggtacgacggca

SEQ ID NO: 52480 - DNA, 20 bp, Neisseria gonorrhoeae
ccgttgccgtcgtaccgccc

SEQ ID NO: 52481 - DNA, 20 bp, Neisseria gonorrhoeae
ccgtcgtaccgcccgacata

SEQ ID NO: 52482 - DNA, 20 bp, Neisseria gonorrhoeae
cgccgccgccgacacgccgt

SEQ ID NO: 52483 - DNA, 20 bp, Neisseria gonorrhoeae
cggcatcgcgcatgagtatg

SEQ ID NO: 52484 - DNA, 20 bp, Neisseria gonorrhoeae
cgcgggcagtgtcaacgtta

SEQ ID NO: 52485 - DNA, 20 bp, Neisseria gonorrhoeae
gcgggcagtgtcaacgttaa

SEQ ID NO: 52486 - DNA, 20 bp, Neisseria gonorrhoeae
aggcttcgctgcgccaggtc

SEQ ID NO: 52487 - DNA, 20 bp, Neisseria gonorrhoeae
gctgcgccaggtcaggcagg

SEQ ID NO: 52488 - DNA, 20 bp, Neisseria gonorrhoeae
gccgccgtgatggacgtttc

SEQ ID NO: 52489 - DNA, 20 bp, Neisseria gonorrhoeae
ccgccgtgatggacgtttcg

SEQ ID NO: 52490 - DNA, 20 bp, Neisseria gonorrhoeae
cgggcttgaaacgcagggag

SEQ ID NO: 52491 - DNA, 20 bp, Neisseria gonorrhoeae
gggcttgaaacgcagggagc

SEQ ID NO: 52492 - DNA, 20 bp, Neisseria gonorrhoeae
aaacgcagggagcaggaagc

SEQ ID NO: 52493 - DNA, 20 bp, Neisseria gonorrhoeae
agggcctgcaatgggcggag

SEQ ID NO: 52494 - DNA, 20 bp, Neisseria gonorrhoeae
gacggcgcgcgggtcaaaat

SEQ ID NO: 52495 - DNA, 20 bp, Neisseria gonorrhoeae
tttgatgccggactgcgccc

SEQ ID NO: 52496 - DNA, 20 bp, Neisseria gonorrhoeae
ttgatgccggactgcgcccc

SEQ ID NO: 52497 - DNA, 20 bp, Neisseria gonorrhoeae
tgatgccggactgcgccccg

SEQ ID NO: 52498 - DNA, 20 bp, Neisseria gonorrhoeae
tgaacgtttccagcccgcgc

SEQ ID NO: 52499 - DNA, 20 bp, Neisseria gonorrhoeae
gaacgtttccagcccgcgca

SEQ ID NO: 52500 - DNA, 20 bp, Neisseria gonorrhoeae
aacgtttccagcccgcgcaa

SEQ ID NO: 52501 - DNA, 20 bp, Neisseria gonorrhoeae
ccagcccgcgcaacatttat

SEQ ID NO: 52502 - DNA, 20 bp, Neisseria gonorrhoeae
cagcccgcgcaacatttatc

SEQ ID NO: 52503 - DNA, 20 bp, Neisseria gonorrhoeae
gcagggcgtgattaagtttg

SEQ ID NO: 52504 - DNA, 20 bp, Neisseria gonorrhoeae
agtttgcgggcgggcgcaac

SEQ ID NO: 52505 - DNA, 20 bp, Neisseria gonorrhoeae
gcgggcgggcgcaacgcggg

SEQ ID NO: 52506 - DNA, 20 bp, Neisseria gonorrhoeae
cgggcgggcgcaacgcgggt

SEQ ID NO: 52507 - DNA, 20 bp, Neisseria gonorrhoeae
gagcaggacggtcaaggcac

SEQ ID NO: 52508 - DNA, 20 bp, Neisseria gonorrhoeae
gctgacattgtgctacgtcg

SEQ ID NO: 52509 - DNA, 20 bp, Neisseria gonorrhoeae
ctgacattgtgctacgtcga

SEQ ID NO: 52510 - DNA, 20 bp, Neisseria gonorrhoeae
tgctacgtcgacggcgaatt

SEQ ID NO: 52511 - DNA, 20 bp, Neisseria gonorrhoeae
gccgtcgacgtagcacaatg

SEQ ID NO: 52512 - DNA, 20 bp, Neisseria gonorrhoeae
agacacacgcccgaagcatc

SEQ ID NO: 52513 - DNA, 20 bp, Neisseria gonorrhoeae
gaggcgcaatacacggtcaa

SEQ ID NO: 52514 - DNA, 20 bp, Neisseria gonorrhoeae
gcatcaaccttgaccgtgta

SEQ ID NO: 52515 - DNA, 20 bp, Neisseria gonorrhoeae
catcaaccttgaccgtgtat

SEQ ID NO: 52516 - DNA, 20 bp, Neisseria gonorrhoeae
accgtgtattgcgcctccaa

SEQ ID NO: 52517 - DNA, 20 bp, Neisseria gonorrhoeae
ggcatcggtgcggccgggaa

SEQ ID NO: 52518 - DNA, 20 bp, Neisseria gonorrhoeae
ccgttcgtggtggacacgca

SEQ ID NO: 52519 - DNA, 20 bp, Neisseria gonorrhoeae
gtggtggacacgcagaaaaa

SEQ ID NO: 52520 - DNA, 20 bp, Neisseria gonorrhoeae
gccgttgatgcccacgcggt

SEQ ID NO: 52521 - DNA, 20 bp, Neisseria gonorrhoeae
atgcccacgcggtttttctg

SEQ ID NO: 52522 - DNA, 20 bp, Neisseria gonorrhoeae
ccgcgccgagcagtgtggaa

SEQ ID NO: 52523 - DNA, 20 bp, Neisseria gonorrhoeae
ttgccgccgccgccctgcct

SEQ ID NO: 52524 - DNA, 20 bp, Neisseria gonorrhoeae
ccgccgccgccctgccttgt

SEQ ID NO: 52525 - DNA, 20 bp, Neisseria gonorrhoeae
tgaaatcgggcaggcgtaaa

SEQ ID NO: 52526 - DNA, 20 bp, Neisseria gonorrhoeae
gtttacgcctgcccgatttc

SEQ ID NO: 52527 - DNA, 20 bp, Neisseria gonorrhoeae
cttcccagccttccgcgcgc

SEQ ID NO: 52528 - DNA, 20 bp, Neisseria gonorrhoeae
ttcccagccttccgcgcgcg

SEQ ID NO: 52529 - DNA, 20 bp, Neisseria gonorrhoeae
ccagccttccgcgcgcggcg

SEQ ID NO: 52530 - DNA, 20 bp, Neisseria gonorrhoeae
cgcgcgcggcggggcggctt

SEQ ID NO: 52531 - DNA, 20 bp, Neisseria gonorrhoeae
gatgtatattcccgagcgag

SEQ ID NO: 52532 - DNA, 20 bp, Neisseria gonorrhoeae
gacgaaactcgaagcccccg

SEQ ID NO: 52533 - DNA, 20 bp, Neisseria gonorrhoeae
acgaaactcgaagcccccgc

SEQ ID NO: 52534 - DNA, 20 bp, Neisseria gonorrhoeae
gaccgcgatgcagccgtatg

SEQ ID NO: 52535 - DNA, 20 bp, Neisseria gonorrhoeae
accgcgatgcagccgtatgc

SEQ ID NO: 52536 - DNA, 20 bp, Neisseria gonorrhoeae
gagtttcgtcaaacccgaca

SEQ ID NO: 52537 - DNA, 20 bp, Neisseria gonorrhoeae
cggaacgcctcaaagccgcc

SEQ ID NO: 52538 - DNA, 20 bp, Neisseria gonorrhoeae
ggaacgcctcaaagccgccg

SEQ ID NO: 52539 - DNA, 20 bp, Neisseria gonorrhoeae
ggcgtgttcgaccgcggcgg

SEQ ID NO: 52540 - DNA, 20 bp, Neisseria gonorrhoeae
gaccgcggcggctttgaggc

SEQ ID NO: 52541 - DNA, 20 bp, Neisseria gonorrhoeae
gaggcgttccgaaacttccg

SEQ ID NO: 52542 - DNA, 20 bp, Neisseria gonorrhoeae
ggcaaatcatcacggaaacc

SEQ ID NO: 52543 - DNA, 20 bp, Neisseria gonorrhoeae
gcaaatcatcacggaaaccg

SEQ ID NO: 52544 - DNA, 20 bp, Neisseria gonorrhoeae
gacgggctgacaggccggct

SEQ ID NO: 52545 - DNA, 20 bp, Neisseria gonorrhoeae
acgggctgacaggccggctg

SEQ ID NO: 52546 - DNA, 20 bp, Neisseria gonorrhoeae
agccggcctgtcagcccgtc

SEQ ID NO: 52547 - DNA, 20 bp, Neisseria gonorrhoeae
gccccctttgccgccgccct

SEQ ID NO: 52548 - DNA, 20 bp, Neisseria gonorrhoeae
ccccctttgccgccgccctg

SEQ ID NO: 52549 - DNA, 20 bp, Neisseria gonorrhoeae
gccgccgccctgatttgcgc

SEQ ID NO: 52550 - DNA, 20 bp, Neisseria gonorrhoeae
ccgccgccctgatttgcgcc

SEQ ID NO: 52551 - DNA, 20 bp, Neisseria gonorrhoeae
gcgcccggctttttccgggc

SEQ ID NO: 52552 - DNA, 20 bp, Neisseria gonorrhoeae
gggcgggggcacgaacggac

SEQ ID NO: 52553 - DNA, 20 bp, Neisseria gonorrhoeae
ttcgcctgcgtccgttcgtg

SEQ ID NO: 52554 - DNA, 20 bp, Neisseria gonorrhoeae
gcctgcgtccgttcgtgccc

SEQ ID NO: 52555 - DNA, 20 bp, Neisseria gonorrhoeae
gtgcccccgccccaattcgc

SEQ ID NO: 52556 - DNA, 20 bp, Neisseria gonorrhoeae
gcccatttgggccttgagct

SEQ ID NO: 52557 - DNA, 20 bp, Neisseria gonorrhoeae
cggcaatggcggcaatgatg

SEQ ID NO: 52558 - DNA, 20 bp, Neisseria gonorrhoeae
atgggcggcggcggcggttc

SEQ ID NO: 52559 - DNA, 20 bp, Neisseria gonorrhoeae
tcaaacgaccacaaccacga

SEQ ID NO: 52560 - DNA, 20 bp, Neisseria gonorrhoeae
tggtcgtttgagaaccgccg

SEQ ID NO: 52561 - DNA, 20 bp, Neisseria gonorrhoeae
gagaaccgccgccgccgccc

SEQ ID NO: 52562 - DNA, 20 bp, Neisseria gonorrhoeae
gcccacttcgccgcgcggca

SEQ ID NO: 52563 - DNA, 20 bp, Neisseria gonorrhoeae
gccgcgcggcacttcgacca

SEQ ID NO: 52564 - DNA, 20 bp, Neisseria gonorrhoeae
gaccaattcttcatcgacgg

SEQ ID NO: 52565 - DNA, 20 bp, Neisseria gonorrhoeae
ttcatcgacggctttggctt

SEQ ID NO: 52566 - DNA, 20 bp, Neisseria gonorrhoeae
atcgacggctttggcttcca

SEQ ID NO: 52567 - DNA, 20 bp, Neisseria gonorrhoeae
ggcaaaccatttgccgaaca

SEQ ID NO: 52568 - DNA, 20 bp, Neisseria gonorrhoeae
gcaaaccatttgccgaacag

SEQ ID NO: 52569 - DNA, 20 bp, Neisseria gonorrhoeae
gccgaacaggtaagacgcgg

SEQ ID NO: 52570 - DNA, 20 bp, Neisseria gonorrhoeae
ccgaacaggtaagacgcggc

SEQ ID NO: 52571 - DNA, 20 bp, Neisseria gonorrhoeae
ccgcgtcttacctgttcggc

SEQ ID NO: 52572 - DNA, 20 bp, Neisseria gonorrhoeae
tccgaccatacgcccgagcg

SEQ ID NO: 52573 - DNA, 20 bp, Neisseria gonorrhoeae
cgctcgggcgtatggtcgga

SEQ ID NO: 52574 - DNA, 20 bp, Neisseria gonorrhoeae
gggctggcaggcgagttttc

SEQ ID NO: 52575 - DNA, 20 bp, Neisseria gonorrhoeae
ggctggcaggcgagttttct

SEQ ID NO: 52576 - DNA, 20 bp, Neisseria gonorrhoeae
tctgctgatcggcctgtgtt

SEQ ID NO: 52577 - DNA, 20 bp, Neisseria gonorrhoeae
gtgtagcaaaaagaacccct

SEQ ID NO: 52578 - DNA, 20 bp, Neisseria gonorrhoeae
ctgttgtcgctatttgcggc

SEQ ID NO: 52579 - DNA, 20 bp, Neisseria gonorrhoeae
tcgctatttgcggcagtttc

SEQ ID NO: 52580 - DNA, 20 bp, Neisseria gonorrhoeae
gcggcagtttcgctgaagat

SEQ ID NO: 52581 - DNA, 20 bp, Neisseria gonorrhoeae
cggcagtttcgctgaagatt

SEQ ID NO: 52582 - DNA, 20 bp, Neisseria gonorrhoeae
gtgattgaagccaaagggac

SEQ ID NO: 52583 - DNA, 20 bp, Neisseria gonorrhoeae
tgattgaagccaaagggact

SEQ ID NO: 52584 - DNA, 20 bp, Neisseria gonorrhoeae
aagccaaagggactgacggg

SEQ ID NO: 52585 - DNA, 20 bp, Neisseria gonorrhoeae
gcgaaaaagcgaagagcgga

SEQ ID NO: 52586 - DNA, 20 bp, Neisseria gonorrhoeae
cgaaaaagcgaagagcggaa

SEQ ID NO: 52587 - DNA, 20 bp, Neisseria gonorrhoeae
gacctgcccccgatactggg

SEQ ID NO: 52588 - DNA, 20 bp, Neisseria gonorrhoeae
acctgcccccgatactgggc

SEQ ID NO: 52589 - DNA, 20 bp, Neisseria gonorrhoeae
cctgtcccgggtagcagcct

SEQ ID NO: 52590 - DNA, 20 bp, Neisseria gonorrhoeae
ctgtcccgggtagcagcctt

SEQ ID NO: 52591 - DNA, 20 bp, Neisseria gonorrhoeae
tttgaagtgtacgccgccga

SEQ ID NO: 52592 - DNA, 20 bp, Neisseria gonorrhoeae
cgggggcgatgtgcaaaatg

SEQ ID NO: 52593 - DNA, 20 bp, Neisseria gonorrhoeae
gggggcgatgtgcaaaatgc

SEQ ID NO: 52594 - DNA, 20 bp, Neisseria gonorrhoeae
cgtcatcctgcaccatcggg

SEQ ID NO: 52595 - DNA, 20 bp, Neisseria gonorrhoeae
tgcacatcgcccccgaaacc

SEQ ID NO: 52596 - DNA, 20 bp, Neisseria gonorrhoeae
gcacatcgcccccgaaaccg

SEQ ID NO: 52597 - DNA, 20 bp, Neisseria gonorrhoeae
cgccagccagcggtcggttt

SEQ ID NO: 52598 - DNA, 20 bp, Neisseria gonorrhoeae
gggcaagcacgtcggcagtc

SEQ ID NO: 52599 - DNA, 20 bp, Neisseria gonorrhoeae
ggcaagcacgtcggcagtct

SEQ ID NO: 52600 - DNA, 20 bp, Neisseria gonorrhoeae
ggcagccgtttcaccgtttt

SEQ ID NO: 52601 - DNA, 20 bp, Neisseria gonorrhoeae
caccgttttcgggaaccatg

SEQ ID NO: 52602 - DNA, 20 bp, Neisseria gonorrhoeae
gggcacgatgtcgccggctt

SEQ ID NO: 52603 - DNA, 20 bp, Neisseria gonorrhoeae
gatggtgcggatggacatcg

SEQ ID NO: 52604 - DNA, 20 bp, Neisseria gonorrhoeae
cacgccgcgcgtgagggcgg

SEQ ID NO: 52605 - DNA, 20 bp, Neisseria gonorrhoeae
acgccgcgcgtgagggcggg

SEQ ID NO: 52606 - DNA, 20 bp, Neisseria gonorrhoeae
gtcttccgcccgccccgatc

SEQ ID NO: 52607 - DNA, 20 bp, Neisseria gonorrhoeae
tcttccgcccgccccgatcc

SEQ ID NO: 52608 - DNA, 20 bp, Neisseria gonorrhoeae
cgcccgccccgatcccttct

SEQ ID NO: 52609 - DNA, 20 bp, Neisseria gonorrhoeae
tacgacgtttggtattggtg

SEQ ID NO: 52610 - DNA, 20 bp, Neisseria gonorrhoeae
ggtattggtgtacccaacgc

SEQ ID NO: 52611 - DNA, 20 bp, Neisseria gonorrhoeae
gccgcccgctacgccaaact

SEQ ID NO: 52612 - DNA, 20 bp, Neisseria gonorrhoeae
atttggccgatgcgctgcaa

SEQ ID NO: 52613 - DNA, 20 bp, Neisseria gonorrhoeae
ggccgatgcgctgcaaaaac

SEQ ID NO: 52614 - DNA, 20 bp, Neisseria gonorrhoeae
gccgatgcgctgcaaaaacg

SEQ ID NO: 52615 - DNA, 20 bp, Neisseria gonorrhoeae
gtcccgtttttgcagcgcat

SEQ ID NO: 52616 - DNA, 20 bp, Neisseria gonorrhoeae
acgatgtcgtagcggccttt

SEQ ID NO: 52617 - DNA, 20 bp, Neisseria gonorrhoeae
ctcatagcccaaggcttcca

SEQ ID NO: 52618 - DNA, 20 bp, Neisseria gonorrhoeae
tcatagcccaaggcttccaa

SEQ ID NO: 52619 - DNA, 20 bp, Neisseria gonorrhoeae
caatgcaaggttggcgatga

SEQ ID NO: 52620 - DNA, 20 bp, Neisseria gonorrhoeae
gcgatgacttcgttggtgtt

SEQ ID NO: 52621 - DNA, 20 bp, Neisseria gonorrhoeae
tgacgagggagatatggttt

SEQ ID NO: 52622 - DNA, 20 bp, Neisseria gonorrhoeae
gacgagggagatatggtttc

SEQ ID NO: 52623 - DNA, 20 bp, Neisseria gonorrhoeae
acgagggagatatggtttcc

SEQ ID NO: 52624 - DNA, 20 bp, Neisseria gonorrhoeae
ccggccagccgcattaatgc

SEQ ID NO: 52625 - DNA, 20 bp, Neisseria gonorrhoeae
cggccagccgcattaatgcc

SEQ ID NO: 52626 - DNA, 20 bp, Neisseria gonorrhoeae
cgcagccataccgatggatt

SEQ ID NO: 52627 - DNA, 20 bp, Neisseria gonorrhoeae
gcccaaggtcgggtgcgggt

SEQ ID NO: 52628 - DNA, 20 bp, Neisseria gonorrhoeae
tgccgatgtctgccgcgtcg

SEQ ID NO: 52629 - DNA, 20 bp, Neisseria gonorrhoeae
gccgatgtctgccgcgtcgc

SEQ ID NO: 52630 - DNA, 20 bp, Neisseria gonorrhoeae
ccgatgtctgccgcgtcgca

SEQ ID NO: 52631 - DNA, 20 bp, Neisseria gonorrhoeae
gtgttgcagaccttcgccgt

SEQ ID NO: 52632 - DNA, 20 bp, Neisseria gonorrhoeae
cagaccttcgccgttcagcg

SEQ ID NO: 52633 - DNA, 20 bp, Neisseria gonorrhoeae
gccgttcagcgtcgtacggc

SEQ ID NO: 52634 - DNA, 20 bp, Neisseria gonorrhoeae
agcgtcgtacggccggcagt

SEQ ID NO: 52635 - DNA, 20 bp, Neisseria gonorrhoeae
ctgctgggcggtactgccgg

SEQ ID NO: 52636 - DNA, 20 bp, Neisseria gonorrhoeae
ctgccacagttcggcaggct

SEQ ID NO: 52637 - DNA, 20 bp, Neisseria gonorrhoeae
ggcaggctgcaccaccggca

SEQ ID NO: 52638 - DNA, 20 bp, Neisseria gonorrhoeae
gccagttgccgatcggagtg

SEQ ID NO: 52639 - DNA, 20 bp, Neisseria gonorrhoeae
ccagttgccgatcggagtgt

SEQ ID NO: 52640 - DNA, 20 bp, Neisseria gonorrhoeae
ccgatcggagtgtggacgac

SEQ ID NO: 52641 - DNA, 20 bp, Neisseria gonorrhoeae
cgtcgtccacactccgatcg

SEQ ID NO: 52642 - DNA, 20 bp, Neisseria gonorrhoeae
ccgccaccaaaaacctgatg

SEQ ID NO: 52643 - DNA, 20 bp, Neisseria gonorrhoeae
cgccaccaaaaacctgatga

SEQ ID NO: 52644 - DNA, 20 bp, Neisseria gonorrhoeae
ttggtggcggaaaggcgcat

SEQ ID NO: 52645 - DNA, 20 bp, Neisseria gonorrhoeae
tggtggcggaaaggcgcatc

SEQ ID NO: 52646 - DNA, 20 bp, Neisseria gonorrhoeae
ggtggcggaaaggcgcatct

SEQ ID NO: 52647 - DNA, 20 bp, Neisseria gonorrhoeae
ccatgcagtacgaacgcggc

SEQ ID NO: 52648 - DNA, 20 bp, Neisseria gonorrhoeae
catgcagtacgaacgcggcg

SEQ ID NO: 52649 - DNA, 20 bp, Neisseria gonorrhoeae
ggacttcaaacgcggcagct

SEQ ID NO: 52650 - DNA, 20 bp, Neisseria gonorrhoeae
gacttcaaacgcggcagctt

SEQ ID NO: 52651 - DNA, 20 bp, Neisseria gonorrhoeae
aaacgcggcagcttccgcgt

SEQ ID NO: 52652 - DNA, 20 bp, Neisseria gonorrhoeae
ctgcgctcccaccgcagcct

SEQ ID NO: 52653 - DNA, 20 bp, Neisseria gonorrhoeae
aaaccataggccgcgccgcg

SEQ ID NO: 52654 - DNA, 20 bp, Neisseria gonorrhoeae
acgttgcgcgcggcgcggcc

SEQ ID NO: 52655 - DNA, 20 bp, Neisseria gonorrhoeae
cgcgcggcgcggcctatggt

SEQ ID NO: 52656 - DNA, 20 bp, Neisseria gonorrhoeae
gaatcaggctgcggtgggag

SEQ ID NO: 52657 - DNA, 20 bp, Neisseria gonorrhoeae
ggcaacgtccgcaccgcctt

SEQ ID NO: 52658 - DNA, 20 bp, Neisseria gonorrhoeae
catggcgaagctgacgttgg

SEQ ID NO: 52659 - DNA, 20 bp, Neisseria gonorrhoeae
atggcgaagctgacgttggc

SEQ ID NO: 52660 - DNA, 20 bp, Neisseria gonorrhoeae
gcggcggcaagcgcgggcgc

SEQ ID NO: 52661 - DNA, 20 bp, Neisseria gonorrhoeae
ccgccgccaacgtcagcttc

SEQ ID NO: 52662 - DNA, 20 bp, Neisseria gonorrhoeae
ctccattgccgccgcgtctt

SEQ ID NO: 52663 - DNA, 20 bp, Neisseria gonorrhoeae
ccgccgcgtctttaaaccaa

SEQ ID NO: 52664 - DNA, 20 bp, Neisseria gonorrhoeae
aaaccaaatgccgtgtttca

SEQ ID NO: 52665 - DNA, 20 bp, Neisseria gonorrhoeae
aaccaaatgccgtgtttcac

SEQ ID NO: 52666 - DNA, 20 bp, Neisseria gonorrhoeae
caccgctttgcccatgccga

SEQ ID NO: 52667 - DNA, 20 bp, Neisseria gonorrhoeae
ggtcatcagcgcgcccgcca

SEQ ID NO: 52668 - DNA, 20 bp, Neisseria gonorrhoeae
gccgcccgcctttttctctt

SEQ ID NO: 52669 - DNA, 20 bp, Neisseria gonorrhoeae
ccgcccgcctttttctcttc

SEQ ID NO: 52670 - DNA, 20 bp, Neisseria gonorrhoeae
ttctcttcgggattggattc

SEQ ID NO: 52671 - DNA, 20 bp, Neisseria gonorrhoeae
tctcttcgggattggattcg

SEQ ID NO: 52672 - DNA, 20 bp, Neisseria gonorrhoeae
ggttccgttaccaatgccga

SEQ ID NO: 52673 - DNA, 20 bp, Neisseria gonorrhoeae
cgttaccaatgccgacattg

SEQ ID NO: 52674 - DNA, 20 bp, Neisseria gonorrhoeae
ccaatgccgacattgctgct

SEQ ID NO: 52675 - DNA, 20 bp, Neisseria gonorrhoeae
ctgctgcaatcgttgctgcc

SEQ ID NO: 52676 - DNA, 20 bp, Neisseria gonorrhoeae
ctgccggcatcgaagccgtg

SEQ ID NO: 52677 - DNA, 20 bp, Neisseria gonorrhoeae
atgggcggggaagccgcagt

SEQ ID NO: 52678 - DNA, 20 bp, Neisseria gonorrhoeae
tgggcggggaagccgcagtg

SEQ ID NO: 52679 - DNA, 20 bp, Neisseria gonorrhoeae
agaaggggacggaaagtgaa

SEQ ID NO: 52680 - DNA, 20 bp, Neisseria gonorrhoeae
actttccgtccccttcttaa

SEQ ID NO: 52681 - DNA, 20 bp, Neisseria gonorrhoeae
ccgtccccttcttaatccac

SEQ ID NO: 52682 - DNA, 20 bp, Neisseria gonorrhoeae
ggctgttggtcagccgcgcc

SEQ ID NO: 52683 - DNA, 20 bp, Neisseria gonorrhoeae
gctgttggtcagccgcgcca

SEQ ID NO: 52684 - DNA, 20 bp, Neisseria gonorrhoeae
gtcagccgcgccacgcgccc

SEQ ID NO: 52685 - DNA, 20 bp, Neisseria gonorrhoeae
ggggagcagctcgacagcct

SEQ ID NO: 52686 - DNA, 20 bp, Neisseria gonorrhoeae
ccgacatggtcagcttcggc

SEQ ID NO: 52687 - DNA, 20 bp, Neisseria gonorrhoeae
gtgtaccgccgccagtccgc

SEQ ID NO: 52688 - DNA, 20 bp, Neisseria gonorrhoeae
tgtaccgccgccagtccgcg

SEQ ID NO: 52689 - DNA, 20 bp, Neisseria gonorrhoeae
caccatgttcgggctgtttg

SEQ ID NO: 52690 - DNA, 20 bp, Neisseria gonorrhoeae
gggctgtttgccgccggctt

SEQ ID NO: 52691 - DNA, 20 bp, Neisseria gonorrhoeae
gccgccggctttatgtattt

SEQ ID NO: 52692 - DNA, 20 bp, Neisseria gonorrhoeae
gagtattttgtgctgggcgg

SEQ ID NO: 52693 - DNA, 20 bp, Neisseria gonorrhoeae
tgtgctgggcggaaaatatg

SEQ ID NO: 52694 - DNA, 20 bp, Neisseria gonorrhoeae
gtgctgggcggaaaatatgc

SEQ ID NO: 52695 - DNA, 20 bp, Neisseria gonorrhoeae
tgctgggcggaaaatatgcc

SEQ ID NO: 52696 - DNA, 20 bp, Neisseria gonorrhoeae
tccgcccagcacaaaatact

SEQ ID NO: 52697 - DNA, 20 bp, Neisseria gonorrhoeae
aataagttcgtatgcatgtt

SEQ ID NO: 52698 - DNA, 20 bp, Neisseria gonorrhoeae
gtatgcatgttgtgccttat

SEQ ID NO: 52699 - DNA, 20 bp, Neisseria gonorrhoeae
tgccttatcgttgacaccgt

SEQ ID NO: 52700 - DNA, 20 bp, Neisseria gonorrhoeae
tcgttgacaccgtccagcat

SEQ ID NO: 52701 - DNA, 20 bp, Neisseria gonorrhoeae
acaccgtccagcatcacata

SEQ ID NO: 52702 - DNA, 20 bp, Neisseria gonorrhoeae
tgatttcagacctgcgttta

SEQ ID NO: 52703 - DNA, 20 bp, Neisseria gonorrhoeae
cagacctgcgtttacggtaa

SEQ ID NO: 52704 - DNA, 20 bp, Neisseria gonorrhoeae
agacctgcgtttacggtaac

SEQ ID NO: 52705 - DNA, 20 bp, Neisseria gonorrhoeae
acggtaacgaagttttggtc

SEQ ID NO: 52706 - DNA, 20 bp, Neisseria gonorrhoeae
cggtaacgaagttttggtcg

SEQ ID NO: 52707 - DNA, 20 bp, Neisseria gonorrhoeae
cggtttgggtttcagacggc

SEQ ID NO: 52708 - DNA, 20 bp, Neisseria gonorrhoeae
gggtttcagacggcatggca

SEQ ID NO: 52709 - DNA, 20 bp, Neisseria gonorrhoeae
ggtttcagacggcatggcag

SEQ ID NO: 52710 - DNA, 20 bp, Neisseria gonorrhoeae
cagacggcatggcagtctgt

SEQ ID NO: 52711 - DNA, 20 bp, Neisseria gonorrhoeae
agacggcatggcagtctgtt

SEQ ID NO: 52712 - DNA, 20 bp, Neisseria gonorrhoeae
gatgtcggcaatgctcatgc

SEQ ID NO: 52713 - DNA, 20 bp, Neisseria gonorrhoeae
atgtcggcaatgctcatgcc

SEQ ID NO: 52714 - DNA, 20 bp, Neisseria gonorrhoeae
ccgtcgagatgtcggacagg

SEQ ID NO: 52715 - DNA, 20 bp, Neisseria gonorrhoeae
tggcggcaggcgtatagact

SEQ ID NO: 52716 - DNA, 20 bp, Neisseria gonorrhoeae
ggcggcaggcgtatagactt

SEQ ID NO: 52717 - DNA, 20 bp, Neisseria gonorrhoeae
tagcgttgggcaagggcgct

SEQ ID NO: 52718 - DNA, 20 bp, Neisseria gonorrhoeae
ggcaagggcgctttggcggc

SEQ ID NO: 52719 - DNA, 20 bp, Neisseria gonorrhoeae
ggcggctttggatatcggat

SEQ ID NO: 52720 - DNA, 20 bp, Neisseria gonorrhoeae
gcggctttggatatcggatt

SEQ ID NO: 52721 - DNA, 20 bp, Neisseria gonorrhoeae
ggatatcggattggaggtgg

SEQ ID NO: 52722 - DNA, 20 bp, Neisseria gonorrhoeae
gccgaggatttcgcctgcgc

SEQ ID NO: 52723 - DNA, 20 bp, Neisseria gonorrhoeae
cgcctgcgccgcggatttcc

SEQ ID NO: 52724 - DNA, 20 bp, Neisseria gonorrhoeae
gcctgcgccgcggatttcca

SEQ ID NO: 52725 - DNA, 20 bp, Neisseria gonorrhoeae
ccaaatcctgcatggcgagg

SEQ ID NO: 52726 - DNA, 20 bp, Neisseria gonorrhoeae
caaatcctgcatggcgaggg

SEQ ID NO: 52727 - DNA, 20 bp, Neisseria gonorrhoeae
tgcgcgtgctgctcgaccag

SEQ ID NO: 52728 - DNA, 20 bp, Neisseria gonorrhoeae
gcgcgtgctgctcgaccaga

SEQ ID NO: 52729 - DNA, 20 bp, Neisseria gonorrhoeae
cgcgtgctgctcgaccagaa

SEQ ID NO: 52730 - DNA, 20 bp, Neisseria gonorrhoeae
gccgcccatcaccgccacaa

SEQ ID NO: 52731 - DNA, 20 bp, Neisseria gonorrhoeae
ccgcccatcaccgccacaaa

SEQ ID NO: 52732 - DNA, 20 bp, Neisseria gonorrhoeae
gccttgttccacgcgccgct

SEQ ID NO: 52733 - DNA, 20 bp, Neisseria gonorrhoeae
ttccacgcgccgctgccgag

SEQ ID NO: 52734 - DNA, 20 bp, Neisseria gonorrhoeae
cacgcgccgctgccgagctt

SEQ ID NO: 52735 - DNA, 20 bp, Neisseria gonorrhoeae
tgcagggcgacgctttcatg

SEQ ID NO: 52736 - DNA, 20 bp, Neisseria gonorrhoeae
catgcgcctgaccggagtag

SEQ ID NO: 52737 - DNA, 20 bp, Neisseria gonorrhoeae
tgcatcgccgtggcaaccgg

SEQ ID NO: 52738 - DNA, 20 bp, Neisseria gonorrhoeae
taatctgccacaacgccgac

SEQ ID NO: 52739 - DNA, 20 bp, Neisseria gonorrhoeae
aatctgccacaacgccgaca

SEQ ID NO: 52740 - DNA, 20 bp, Neisseria gonorrhoeae
atctgccacaacgccgacag

SEQ ID NO: 52741 - DNA, 20 bp, Neisseria gonorrhoeae
tggcagattaaaagcggcgc

SEQ ID NO: 52742 - DNA, 20 bp, Neisseria gonorrhoeae
gtggatgtaggcggcgagga

SEQ ID NO: 52743 - DNA, 20 bp, Neisseria gonorrhoeae
tggatgtaggcggcgaggac

SEQ ID NO: 52744 - DNA, 20 bp, Neisseria gonorrhoeae
tacgcagcaagggattgaag

SEQ ID NO: 52745 - DNA, 20 bp, Neisseria gonorrhoeae
acgcagcaagggattgaagg

SEQ ID NO: 52746 - DNA, 20 bp, Neisseria gonorrhoeae
cgcagcaagggattgaaggg

SEQ ID NO: 52747 - DNA, 20 bp, Neisseria gonorrhoeae
ttcgaccgccgcgtagatga

SEQ ID NO: 52748 - DNA, 20 bp, Neisseria gonorrhoeae
gaccgccgcgtagatgaggg

SEQ ID NO: 52749 - DNA, 20 bp, Neisseria gonorrhoeae
cagcaggcgcggggcgatac

SEQ ID NO: 52750 - DNA, 20 bp, Neisseria gonorrhoeae
gatggcttcggatgccgtcc

SEQ ID NO: 52751 - DNA, 20 bp, Neisseria gonorrhoeae
ggatgccgtccagacagaca

SEQ ID NO: 52752 - DNA, 20 bp, Neisseria gonorrhoeae
cgcgccatcgaaatgctgtc

SEQ ID NO: 52753 - DNA, 20 bp, Neisseria gonorrhoeae
tgcggcgggatgttggtcgc

SEQ ID NO: 52754 - DNA, 20 bp, Neisseria gonorrhoeae
gtcgccataccgacggcgat

SEQ ID NO: 52755 - DNA, 20 bp, Neisseria gonorrhoeae
acgagcagtgtggggaaacg

SEQ ID NO: 52756 - DNA, 20 bp, Neisseria gonorrhoeae
tactgccgacccgtttcccc

SEQ ID NO: 52757 - DNA, 20 bp, Neisseria gonorrhoeae
ccccacactgctcgtcaacg

SEQ ID NO: 52758 - DNA, 20 bp, Neisseria gonorrhoeae
gtcgttgcggccaagcgcgc

SEQ ID NO: 52759 - DNA, 20 bp, Neisseria gonorrhoeae
cggccaagcgcgcgcaggac

SEQ ID NO: 52760 - DNA, 20 bp, Neisseria gonorrhoeae
gagcgaggcggaggtgcagg

SEQ ID NO: 52761 - DNA, 20 bp, Neisseria gonorrhoeae
gccgcaacgacgaactggcg

SEQ ID NO: 52762 - DNA, 20 bp, Neisseria gonorrhoeae
gtcggcatccagcaggtatt

SEQ ID NO: 52763 - DNA, 20 bp, Neisseria gonorrhoeae
tcggcatccagcaggtattg

SEQ ID NO: 52764 - DNA, 20 bp, Neisseria gonorrhoeae
ggcgaacttggccgcttcgc

SEQ ID NO: 52765 - DNA, 20 bp, Neisseria gonorrhoeae
gccgcttcgccgaagcagac

SEQ ID NO: 52766 - DNA, 20 bp, Neisseria gonorrhoeae
gccgaagcagacgggcaaaa

SEQ ID NO: 52767 - DNA, 20 bp, Neisseria gonorrhoeae
gcaggataatgaaaagcaac

SEQ ID NO: 52768 - DNA, 20 bp, Neisseria gonorrhoeae
aatttgcaggttatcactat

SEQ ID NO: 52769 - DNA, 20 bp, Neisseria gonorrhoeae
gcaggttatcactatgtgca

SEQ ID NO: 52770 - DNA, 20 bp, Neisseria gonorrhoeae
caggttatcactatgtgcat

SEQ ID NO: 52771 - DNA, 20 bp, Neisseria gonorrhoeae
tcactatgtgcataggcggc

SEQ ID NO: 52772 - DNA, 20 bp, Neisseria gonorrhoeae
ccaacctcgacgattatgtc

SEQ ID NO: 52773 - DNA, 20 bp, Neisseria gonorrhoeae
tgtcatcgggcaggggcagg

SEQ ID NO: 52774 - DNA, 20 bp, Neisseria gonorrhoeae
cggtttacaaccattacaaa

SEQ ID NO: 52775 - DNA, 20 bp, Neisseria gonorrhoeae
acaaccattacaaacgcctg

SEQ ID NO: 52776 - DNA, 20 bp, Neisseria gonorrhoeae
gtaatggttgtaaaccgcaa

SEQ ID NO: 52777 - DNA, 20 bp, Neisseria gonorrhoeae
ctgcccctgactgcggacgt

SEQ ID NO: 52778 - DNA, 20 bp, Neisseria gonorrhoeae
tgcccctgactgcggacgtt

SEQ ID NO: 52779 - DNA, 20 bp, Neisseria gonorrhoeae
tgcaaggtttccggcgcgtt

SEQ ID NO: 52780 - DNA, 20 bp, Neisseria gonorrhoeae
ccggcgcgttgatgatgtcg

SEQ ID NO: 52781 - DNA, 20 bp, Neisseria gonorrhoeae
cggcgcgttgatgatgtcga

SEQ ID NO: 52782 - DNA, 20 bp, Neisseria gonorrhoeae
aaatccctgctggtgcgcgc

SEQ ID NO: 52783 - DNA, 20 bp, Neisseria gonorrhoeae
gggcgtgcggactgatggta

SEQ ID NO: 52784 - DNA, 20 bp, Neisseria gonorrhoeae
gacaaaggcggtcagctgac

SEQ ID NO: 52785 - DNA, 20 bp, Neisseria gonorrhoeae
tgccaatgcgccgactttgg

SEQ ID NO: 52786 - DNA, 20 bp, Neisseria gonorrhoeae
gccaatgcgccgactttggt

SEQ ID NO: 52787 - DNA, 20 bp, Neisseria gonorrhoeae
ccaatgcgccgactttggtg

SEQ ID NO: 52788 - DNA, 20 bp, Neisseria gonorrhoeae
ggtggcgacgacttcgccgt

SEQ ID NO: 52789 - DNA, 20 bp, Neisseria gonorrhoeae
gcgcgatgtcgtaaccacct

SEQ ID NO: 52790 - DNA, 20 bp, Neisseria gonorrhoeae
cgcgatgtcgtaaccacctt

SEQ ID NO: 52791 - DNA, 20 bp, Neisseria gonorrhoeae
aaacgccgcgcgcccgaaat

SEQ ID NO: 52792 - DNA, 20 bp, Neisseria gonorrhoeae
atccggccgccgttcagggc

SEQ ID NO: 52793 - DNA, 20 bp, Neisseria gonorrhoeae
tccggccgccgttcagggcg

SEQ ID NO: 52794 - DNA, 20 bp, Neisseria gonorrhoeae
cgggcgtttaacgaagaacc

SEQ ID NO: 52795 - DNA, 20 bp, Neisseria gonorrhoeae
aacgaagaaccggtcgtgcg

SEQ ID NO: 52796 - DNA, 20 bp, Neisseria gonorrhoeae
acgaagaaccggtcgtgcgc

SEQ ID NO: 52797 - DNA, 20 bp, Neisseria gonorrhoeae
ccgtcgtcagcggcgtggga

SEQ ID NO: 52798 - DNA, 20 bp, Neisseria gonorrhoeae
gatggcgcgcacgaccggtt

SEQ ID NO: 52799 - DNA, 20 bp, Neisseria gonorrhoeae
tttccatgtacggcggcgga

SEQ ID NO: 52800 - DNA, 20 bp, Neisseria gonorrhoeae
ccatgtacggcggcggattt

SEQ ID NO: 52801 - DNA, 20 bp, Neisseria gonorrhoeae
catgtacggcggcggatttg

SEQ ID NO: 52802 - DNA, 20 bp, Neisseria gonorrhoeae
gccgccattcccgcctacct

SEQ ID NO: 52803 - DNA, 20 bp, Neisseria gonorrhoeae
ccgccattcccgcctacctg

SEQ ID NO: 52804 - DNA, 20 bp, Neisseria gonorrhoeae
ccttgtgggcgaaaaagttt

SEQ ID NO: 52805 - DNA, 20 bp, Neisseria gonorrhoeae
tgggcgaaaaagtttccggc

SEQ ID NO: 52806 - DNA, 20 bp, Neisseria gonorrhoeae
ccggcgacggcatatcggtc

SEQ ID NO: 52807 - DNA, 20 bp, Neisseria gonorrhoeae
cggcgacggcatatcggtct

SEQ ID NO: 52808 - DNA, 20 bp, Neisseria gonorrhoeae
ggcattggccgtcataccgc

SEQ ID NO: 52809 - DNA, 20 bp, Neisseria gonorrhoeae
ttgcggcacatgcgggcgca

SEQ ID NO: 52810 - DNA, 20 bp, Neisseria gonorrhoeae
cggcacatgcgggcgcaaac

SEQ ID NO: 52811 - DNA, 20 bp, Neisseria gonorrhoeae
gagctcggcggcagcaacgc

SEQ ID NO: 52812 - DNA, 20 bp, Neisseria gonorrhoeae
ctgccgccgagctccaacac

SEQ ID NO: 52813 - DNA, 20 bp, Neisseria gonorrhoeae
tcttgaggtttgcgcccgca

SEQ ID NO: 52814 - DNA, 20 bp, Neisseria gonorrhoeae
cacaggggtcggggtggttt

SEQ ID NO: 52815 - DNA, 20 bp, Neisseria gonorrhoeae
taccctgcgacggttttaga

SEQ ID NO: 52816 - DNA, 20 bp, Neisseria gonorrhoeae
accctgcgacggttttagac

SEQ ID NO: 52817 - DNA, 20 bp, Neisseria gonorrhoeae
ccctgcgacggttttagaca

SEQ ID NO: 52818 - DNA, 20 bp, Neisseria gonorrhoeae
tagacagggtaaatcctgcc

SEQ ID NO: 52819 - DNA, 20 bp, Neisseria gonorrhoeae
gcctgccagtcgtgcgatac

SEQ ID NO: 52820 - DNA, 20 bp, Neisseria gonorrhoeae
cctgccagtcgtgcgatacg

SEQ ID NO: 52821 - DNA, 20 bp, Neisseria gonorrhoeae
gctgccgatacgttcggggt

SEQ ID NO: 52822 - DNA, 20 bp, Neisseria gonorrhoeae
ggggtggatgttggtcagtc

SEQ ID NO: 52823 - DNA, 20 bp, Neisseria gonorrhoeae
gtcagtccggcacgggtcat

SEQ ID NO: 52824 - DNA, 20 bp, Neisseria gonorrhoeae
tccggcaggtcttgtgcggc

SEQ ID NO: 52825 - DNA, 20 bp, Neisseria gonorrhoeae
ccggcaggtcttgtgcggct

SEQ ID NO: 52826 - DNA, 20 bp, Neisseria gonorrhoeae
cggcaggtcttgtgcggcta

SEQ ID NO: 52827 - DNA, 20 bp, Neisseria gonorrhoeae
tgcggctaaggttgctttgc

SEQ ID NO: 52828 - DNA, 20 bp, Neisseria gonorrhoeae
ctttgccttgcgacgtatgc

SEQ ID NO: 52829 - DNA, 20 bp, Neisseria gonorrhoeae
gggcaccaaatcgcgcgggg

SEQ ID NO: 52830 - DNA, 20 bp, Neisseria gonorrhoeae
gcagcggcgcggtgatttcg

SEQ ID NO: 52831 - DNA, 20 bp, Neisseria gonorrhoeae
cagcggcgcggtgatttcgc

SEQ ID NO: 52832 - DNA, 20 bp, Neisseria gonorrhoeae
cgcggcggcggctggtcagg

SEQ ID NO: 52833 - DNA, 20 bp, Neisseria gonorrhoeae
gcggcggcggctggtcaggg

SEQ ID NO: 52834 - DNA, 20 bp, Neisseria gonorrhoeae
gtcccttttctttcaattgt

SEQ ID NO: 52835 - DNA, 20 bp, Neisseria gonorrhoeae
tcccttttctttcaattgtt

SEQ ID NO: 52836 - DNA, 20 bp, Neisseria gonorrhoeae
tctttcaattgtttaaaggc

SEQ ID NO: 52837 - DNA, 20 bp, Neisseria gonorrhoeae
ctttcaattgtttaaaggcg

SEQ ID NO: 52838 - DNA, 20 bp, Neisseria gonorrhoeae
tttcaattgtttaaaggcgg

SEQ ID NO: 52839 - DNA, 20 bp, Neisseria gonorrhoeae
aagaggcagtgtttgcggtg

SEQ ID NO: 52840 - DNA, 20 bp, Neisseria gonorrhoeae
agaggcagtgtttgcggtgt

SEQ ID NO: 52841 - DNA, 20 bp, Neisseria gonorrhoeae
gcggtgttcggtaatgtcga

SEQ ID NO: 52842 - DNA, 20 bp, Neisseria gonorrhoeae
cggtgttcggtaatgtcgaa

SEQ ID NO: 52843 - DNA, 20 bp, Neisseria gonorrhoeae
ggtaatgtcgaatgtgaatg

SEQ ID NO: 52844 - DNA, 20 bp, Neisseria gonorrhoeae
ttgtagcagttgttaaagaa

SEQ ID NO: 52845 - DNA, 20 bp, Neisseria gonorrhoeae
tgtagcagttgttaaagaag

SEQ ID NO: 52846 - DNA, 20 bp, Neisseria gonorrhoeae
gtagcagttgttaaagaaga

SEQ ID NO: 52847 - DNA, 20 bp, Neisseria gonorrhoeae
tagcagttgttaaagaagat

SEQ ID NO: 52848 - DNA, 20 bp, Neisseria gonorrhoeae
ttaaagaagatgtcggcgaa

SEQ ID NO: 52849 - DNA, 20 bp, Neisseria gonorrhoeae
gaccggatcggtttcttcgg

SEQ ID NO: 52850 - DNA, 20 bp, Neisseria gonorrhoeae
accggatcggtttcttcggc

SEQ ID NO: 52851 - DNA, 20 bp, Neisseria gonorrhoeae
cttcggcgggattcggcact

SEQ ID NO: 52852 - DNA, 20 bp, Neisseria gonorrhoeae
ttcggcgggattcggcactt

SEQ ID NO: 52853 - DNA, 20 bp, Neisseria gonorrhoeae
ggcgggattcggcactttgc

SEQ ID NO: 52854 - DNA, 20 bp, Neisseria gonorrhoeae
gacttcggaagtgccgatgc

SEQ ID NO: 52855 - DNA, 20 bp, Neisseria gonorrhoeae
ggaagtgccgatgccgtgtg

SEQ ID NO: 52856 - DNA, 20 bp, Neisseria gonorrhoeae
gcacacttccacccacggcg

SEQ ID NO: 52857 - DNA, 20 bp, Neisseria gonorrhoeae
cacccacggcgcattcggcg

SEQ ID NO: 52858 - DNA, 20 bp, Neisseria gonorrhoeae
ggcgcactggcacacggcat

SEQ ID NO: 52859 - DNA, 20 bp, Neisseria gonorrhoeae
ggcgcgctacctattgcagg

SEQ ID NO: 52860 - DNA, 20 bp, Neisseria gonorrhoeae
gcgcgctacctattgcagga

SEQ ID NO: 52861 - DNA, 20 bp, Neisseria gonorrhoeae
caggagttcggcagcttggg

SEQ ID NO: 52862 - DNA, 20 bp, Neisseria gonorrhoeae
ggcagcttggggaggctgat

SEQ ID NO: 52863 - DNA, 20 bp, Neisseria gonorrhoeae
gggaggctgatgagcgcgga

SEQ ID NO: 52864 - DNA, 20 bp, Neisseria gonorrhoeae
tctatccgtccgcaccgcaa

SEQ ID NO: 52865 - DNA, 20 bp, Neisseria gonorrhoeae
aggtagtgcagcgcatcgcc

SEQ ID NO: 52866 - DNA, 20 bp, Neisseria gonorrhoeae
gcggtgcggacggatagaca

SEQ ID NO: 52867 - DNA, 20 bp, Neisseria gonorrhoeae
cggtgcggacggatagacaa

SEQ ID NO: 52868 - DNA, 20 bp, Neisseria gonorrhoeae
gcccgcgggcagggattggt

SEQ ID NO: 52869 - DNA, 20 bp, Neisseria gonorrhoeae
gtggaaacccataatggcac

SEQ ID NO: 52870 - DNA, 20 bp, Neisseria gonorrhoeae
tggaaacccataatggcacg

SEQ ID NO: 52871 - DNA, 20 bp, Neisseria gonorrhoeae
gtgcgtgccattatgggttt

SEQ ID NO: 52872 - DNA, 20 bp, Neisseria gonorrhoeae
tgggtttccacaaagtcgga

SEQ ID NO: 52873 - DNA, 20 bp, Neisseria gonorrhoeae
ccacaaagtcggattggact

SEQ ID NO: 52874 - DNA, 20 bp, Neisseria gonorrhoeae
ccgccgccatcatcatgacc

SEQ ID NO: 52875 - DNA, 20 bp, Neisseria gonorrhoeae
atcgccggcatttacagcct

SEQ ID NO: 52876 - DNA, 20 bp, Neisseria gonorrhoeae
acagcctcgccaccaacgca

SEQ ID NO: 52877 - DNA, 20 bp, Neisseria gonorrhoeae
cagcctcgccaccaacgcag

SEQ ID NO: 52878 - DNA, 20 bp, Neisseria gonorrhoeae
gaaatacatcccctgccctg

SEQ ID NO: 52879 - DNA, 20 bp, Neisseria gonorrhoeae
tatgttgctgtgggggccgc

SEQ ID NO: 52880 - DNA, 20 bp, Neisseria gonorrhoeae
ctgtgggggccgccgggcgt

SEQ ID NO: 52881 - DNA, 20 bp, Neisseria gonorrhoeae
gcgcggattttggcgcagag

SEQ ID NO: 52882 - DNA, 20 bp, Neisseria gonorrhoeae
tggcgcagagtttcaatgcc

SEQ ID NO: 52883 - DNA, 20 bp, Neisseria gonorrhoeae
ggcgcagagtttcaatgccc

SEQ ID NO: 52884 - DNA, 20 bp, Neisseria gonorrhoeae
ctcgccgacagcttgggcgc

SEQ ID NO: 52885 - DNA, 20 bp, Neisseria gonorrhoeae
tcgccgacagcttgggcgcg

SEQ ID NO: 52886 - DNA, 20 bp, Neisseria gonorrhoeae
ggcgcgcaaatccgccgttt

SEQ ID NO: 52887 - DNA, 20 bp, Neisseria gonorrhoeae
cgacaaaggcggcgagagtt

SEQ ID NO: 52888 - DNA, 20 bp, Neisseria gonorrhoeae
gacaaaggcggcgagagttt

SEQ ID NO: 52889 - DNA, 20 bp, Neisseria gonorrhoeae
gtcaaagaaaacgccagcga

SEQ ID NO: 52890 - DNA, 20 bp, Neisseria gonorrhoeae
cgcaggtggacgggcacttc

SEQ ID NO: 52891 - DNA, 20 bp, Neisseria gonorrhoeae
gtcgctggcgttttctttga

SEQ ID NO: 52892 - DNA, 20 bp, Neisseria gonorrhoeae
tctttgacgaagcggcgcat

SEQ ID NO: 52893 - DNA, 20 bp, Neisseria gonorrhoeae
ctttgacgaagcggcgcatt

SEQ ID NO: 52894 - DNA, 20 bp, Neisseria gonorrhoeae
cggcctgttggacgcgatca

SEQ ID NO: 52895 - DNA, 20 bp, Neisseria gonorrhoeae
ggcctgttggacgcgatcaa

SEQ ID NO: 52896 - DNA, 20 bp, Neisseria gonorrhoeae
gacgcgatcaagggctttgg

SEQ ID NO: 52897 - DNA, 20 bp, Neisseria gonorrhoeae
gggcagcgaccaggaatggc

SEQ ID NO: 52898 - DNA, 20 bp, Neisseria gonorrhoeae
ggcagcgaccaggaatggcg

SEQ ID NO: 52899 - DNA, 20 bp, Neisseria gonorrhoeae
atgatttcgcagatgacggc

SEQ ID NO: 52900 - DNA, 20 bp, Neisseria gonorrhoeae
cgcagatgacggcggcggga

SEQ ID NO: 52901 - DNA, 20 bp, Neisseria gonorrhoeae
gcagatgacggcggcgggaa

SEQ ID NO: 52902 - DNA, 20 bp, Neisseria gonorrhoeae
atttgcgccaagtcgacgcc

SEQ ID NO: 52903 - DNA, 20 bp, Neisseria gonorrhoeae
gcgccaagtcgacgccggct

SEQ ID NO: 52904 - DNA, 20 bp, Neisseria gonorrhoeae
ttgtcggcaggaacagagga

SEQ ID NO: 52905 - DNA, 20 bp, Neisseria gonorrhoeae
tcggcaggaacagaggattt

SEQ ID NO: 52906 - DNA, 20 bp, Neisseria gonorrhoeae
agccgtttcaggcagcctga

SEQ ID NO: 52907 - DNA, 20 bp, Neisseria gonorrhoeae
gccgtttcaggcagcctgaa

SEQ ID NO: 52908 - DNA, 20 bp, Neisseria gonorrhoeae
caggcagcctgaacaatcaa

SEQ ID NO: 52909 - DNA, 20 bp, Neisseria gonorrhoeae
atgagtgcaggtatcggctt

SEQ ID NO: 52910 - DNA, 20 bp, Neisseria gonorrhoeae
actattggcagcaagacaaa

SEQ ID NO: 52911 - DNA, 20 bp, Neisseria gonorrhoeae
gcagcaagacaaacacacaa

SEQ ID NO: 52912 - DNA, 20 bp, Neisseria gonorrhoeae
gttttcttgtgtgtttgtct

SEQ ID NO: 52913 - DNA, 20 bp, Neisseria gonorrhoeae
tcttgtgtgtttgtcttgct

SEQ ID NO: 52914 - DNA, 20 bp, Neisseria gonorrhoeae
ggtgcgggcgggtcggaagc

SEQ ID NO: 52915 - DNA, 20 bp, Neisseria gonorrhoeae
ttcctccgcattcaggctgc

SEQ ID NO: 52916 - DNA, 20 bp, Neisseria gonorrhoeae
tcctccgcattcaggctgcc

SEQ ID NO: 52917 - DNA, 20 bp, Neisseria gonorrhoeae
cctccgcattcaggctgccg

SEQ ID NO: 52918 - DNA, 20 bp, Neisseria gonorrhoeae
ctccgcattcaggctgccgc

SEQ ID NO: 52919 - DNA, 20 bp, Neisseria gonorrhoeae
cgcgcgcggccgtaatagcc

SEQ ID NO: 52920 - DNA, 20 bp, Neisseria gonorrhoeae
gtcttgcggcgcggcggcaa

SEQ ID NO: 52921 - DNA, 20 bp, Neisseria gonorrhoeae
cggcgcggcggcaagcgtct

SEQ ID NO: 52922 - DNA, 20 bp, Neisseria gonorrhoeae
cttggaaaaattcccgaccg

SEQ ID NO: 52923 - DNA, 20 bp, Neisseria gonorrhoeae
ttggaaaaattcccgaccgt

SEQ ID NO: 52924 - DNA, 20 bp, Neisseria gonorrhoeae
attgcaggtgccggccctgt

SEQ ID NO: 52925 - DNA, 20 bp, Neisseria gonorrhoeae
caggtgccggccctgtcggt

SEQ ID NO: 52926 - DNA, 20 bp, Neisseria gonorrhoeae
cacatcgccgtattgcacgc

SEQ ID NO: 52927 - DNA, 20 bp, Neisseria gonorrhoeae
acatcgccgtattgcacgcc

SEQ ID NO: 52928 - DNA, 20 bp, Neisseria gonorrhoeae
cacgccgatttcgtgggcgg

SEQ ID NO: 52929 - DNA, 20 bp, Neisseria gonorrhoeae
gccgccaacgacttcggcag

SEQ ID NO: 52930 - DNA, 20 bp, Neisseria gonorrhoeae
ccgccaacgacttcggcagg

SEQ ID NO: 52931 - DNA, 20 bp, Neisseria gonorrhoeae
ggcagggaagagtttgagtg

SEQ ID NO: 52932 - DNA, 20 bp, Neisseria gonorrhoeae
gagtgtgtcgatgccgtgtt

SEQ ID NO: 52933 - DNA, 20 bp, Neisseria gonorrhoeae
agtgtgtcgatgccgtgttc

SEQ ID NO: 52934 - DNA, 20 bp, Neisseria gonorrhoeae
gcggccgcagccttgttggt

SEQ ID NO: 52935 - DNA, 20 bp, Neisseria gonorrhoeae
ttggttcgcgcccaaatcga

SEQ ID NO: 52936 - DNA, 20 bp, Neisseria gonorrhoeae
gttcgcgcccaaatcgatgc

SEQ ID NO: 52937 - DNA, 20 bp, Neisseria gonorrhoeae
gcgcccaaatcgatgcgctc

SEQ ID NO: 52938 - DNA, 20 bp, Neisseria gonorrhoeae
tcggacgttccattcggcct

SEQ ID NO: 52939 - DNA, 20 bp, Neisseria gonorrhoeae
gcctgacgcgccggacatac

SEQ ID NO: 52940 - DNA, 20 bp, Neisseria gonorrhoeae
cctgacgcgccggacatacg

SEQ ID NO: 52941 - DNA, 20 bp, Neisseria gonorrhoeae
gaagccgcggtcttgcagga

SEQ ID NO: 52942 - DNA, 20 bp, Neisseria gonorrhoeae
aagccgcggtcttgcaggat

SEQ ID NO: 52943 - DNA, 20 bp, Neisseria gonorrhoeae
ggcatcctgcaagaccgcgg

SEQ ID NO: 52944 - DNA, 20 bp, Neisseria gonorrhoeae
caactcgccgcgttcaaatg

SEQ ID NO: 52945 - DNA, 20 bp, Neisseria gonorrhoeae
aaatgccgccaacacttcgc

SEQ ID NO: 52946 - DNA, 20 bp, Neisseria gonorrhoeae
gcgctggtcgttgaacacga

SEQ ID NO: 52947 - DNA, 20 bp, Neisseria gonorrhoeae
aacacgatggcgggtgcttc

SEQ ID NO: 52948 - DNA, 20 bp, Neisseria gonorrhoeae
gatgatgcggcagccttcgc

SEQ ID NO: 52949 - DNA, 20 bp, Neisseria gonorrhoeae
gcgcgcgacggcaacaagtg

SEQ ID NO: 52950 - DNA, 20 bp, Neisseria gonorrhoeae
agacggcatcgggttcgcaa

SEQ ID NO: 52951 - DNA, 20 bp, Neisseria gonorrhoeae
gcaatgccgtctgaaggagg

SEQ ID NO: 52952 - DNA, 20 bp, Neisseria gonorrhoeae
agacggcattgcgaacccga

SEQ ID NO: 52953 - DNA, 20 bp, Neisseria gonorrhoeae
cgaacccgatgccgtctgaa

SEQ ID NO: 52954 - DNA, 20 bp, Neisseria gonorrhoeae
gtctccaacgtggacggctc

SEQ ID NO: 52955 - DNA, 20 bp, Neisseria gonorrhoeae
tccaaagtccacccggaaac

SEQ ID NO: 52956 - DNA, 20 bp, Neisseria gonorrhoeae
ccgggtggactttggacaat

SEQ ID NO: 52957 - DNA, 20 bp, Neisseria gonorrhoeae
cgggtggactttggacaata

SEQ ID NO: 52958 - DNA, 20 bp, Neisseria gonorrhoeae
ggacaatacgtcgcgcagtt

SEQ ID NO: 52959 - DNA, 20 bp, Neisseria gonorrhoeae
cctcgcttgaaaaacgcagc

SEQ ID NO: 52960 - DNA, 20 bp, Neisseria gonorrhoeae
aaaaacgcagcaacctgccc

SEQ ID NO: 52961 - DNA, 20 bp, Neisseria gonorrhoeae
ccaacgtctttgcacaagca

SEQ ID NO: 52962 - DNA, 20 bp, Neisseria gonorrhoeae
gcacaagcagaagcctttat

SEQ ID NO: 52963 - DNA, 20 bp, Neisseria gonorrhoeae
cacaagcagaagcctttatg

SEQ ID NO: 52964 - DNA, 20 bp, Neisseria gonorrhoeae
gggttccggattcccgcttt

SEQ ID NO: 52965 - DNA, 20 bp, Neisseria gonorrhoeae
ggttccggattcccgctttc

SEQ ID NO: 52966 - DNA, 20 bp, Neisseria gonorrhoeae
cggattcccgctttcgcggg

SEQ ID NO: 52967 - DNA, 20 bp, Neisseria gonorrhoeae
ccgctttcgcgggaatggcg

SEQ ID NO: 52968 - DNA, 20 bp, Neisseria gonorrhoeae
cgcgggaatggcgaagagtg

SEQ ID NO: 52969 - DNA, 20 bp, Neisseria gonorrhoeae
cgccagccttgacgcgtcca

SEQ ID NO: 52970 - DNA, 20 bp, Neisseria gonorrhoeae
acgcgtccagtgcgccgacg

SEQ ID NO: 52971 - DNA, 20 bp, Neisseria gonorrhoeae
gcggtttcgccgtgggactt

SEQ ID NO: 52972 - DNA, 20 bp, Neisseria gonorrhoeae
cgccgtgggactttatccgg

SEQ ID NO: 52973 - DNA, 20 bp, Neisseria gonorrhoeae
gccgtgggactttatccgga

SEQ ID NO: 52974 - DNA, 20 bp, Neisseria gonorrhoeae
ggcgatgtgggcgagggtgt

SEQ ID NO: 52975 - DNA, 20 bp, Neisseria gonorrhoeae
cccgcgtccgttttctgcgt

SEQ ID NO: 52976 - DNA, 20 bp, Neisseria gonorrhoeae
tctgcgtcggtcattggggt

SEQ ID NO: 52977 - DNA, 20 bp, Neisseria gonorrhoeae
ctgcgtcggtcattggggtt

SEQ ID NO: 52978 - DNA, 20 bp, Neisseria gonorrhoeae
tgcgtcggtcattggggttt

SEQ ID NO: 52979 - DNA, 20 bp, Neisseria gonorrhoeae
gggcggcatagatatggtag

SEQ ID NO: 52980 - DNA, 20 bp, Neisseria gonorrhoeae
cgtagccgcactcgtcccca

SEQ ID NO: 52981 - DNA, 20 bp, Neisseria gonorrhoeae
gatttcggctttggggacga

SEQ ID NO: 52982 - DNA, 20 bp, Neisseria gonorrhoeae
cggctttggggacgagtgcg

SEQ ID NO: 52983 - DNA, 20 bp, Neisseria gonorrhoeae
ggctttggggacgagtgcgg

SEQ ID NO: 52984 - DNA, 20 bp, Neisseria gonorrhoeae
ttttccgatagattcctgtg

SEQ ID NO: 52985 - DNA, 20 bp, Neisseria gonorrhoeae
tttccgatagattcctgtgg

SEQ ID NO: 52986 - DNA, 20 bp, Neisseria gonorrhoeae
ttccgatagattcctgtggt

SEQ ID NO: 52987 - DNA, 20 bp, Neisseria gonorrhoeae
tccgatagattcctgtggtt

SEQ ID NO: 52988 - DNA, 20 bp, Neisseria gonorrhoeae
ccgatagattcctgtggttt

SEQ ID NO: 52989 - DNA, 20 bp, Neisseria gonorrhoeae
tgcccacgccgcgcgtcccg

SEQ ID NO: 52990 - DNA, 20 bp, Neisseria gonorrhoeae
gcccacgccgcgcgtcccgg

SEQ ID NO: 52991 - DNA, 20 bp, Neisseria gonorrhoeae
cccacgccgcgcgtcccggt

SEQ ID NO: 52992 - DNA, 20 bp, Neisseria gonorrhoeae
gtccaaggcattttgcaggg

SEQ ID NO: 52993 - DNA, 20 bp, Neisseria gonorrhoeae
gacgaaggcaggctgcacca

SEQ ID NO: 52994 - DNA, 20 bp, Neisseria gonorrhoeae
gcgcgtgtgtcggcaagggc

SEQ ID NO: 52995 - DNA, 20 bp, Neisseria gonorrhoeae
gttgagcgtgtggaacacga

SEQ ID NO: 52996 - DNA, 20 bp, Neisseria gonorrhoeae
ttgagcgtgtggaacacgag

SEQ ID NO: 52997 - DNA, 20 bp, Neisseria gonorrhoeae
agcgtgtggaacacgagttg

SEQ ID NO: 52998 - DNA, 20 bp, Neisseria gonorrhoeae
gtgtacttgccggctgtcgc

SEQ ID NO: 52999 - DNA, 20 bp, Neisseria gonorrhoeae
acggcatggagcatgacttt

SEQ ID NO: 53000 - DNA, 20 bp, Neisseria gonorrhoeae
gtcgcggacaaaacgatggt

SEQ ID NO: 53001 - DNA, 20 bp, Neisseria gonorrhoeae
tcgcggacaaaacgatggtt

SEQ ID NO: 53002 - DNA, 20 bp, Neisseria gonorrhoeae
acgaagcaatattgtttatc

SEQ ID NO: 53003 - DNA, 20 bp, Neisseria gonorrhoeae
cttcgtcaaccatcgttttg

SEQ ID NO: 53004 - DNA, 20 bp, Neisseria gonorrhoeae
cggatgcccggcagtggcag

SEQ ID NO: 53005 - DNA, 20 bp, Neisseria gonorrhoeae
cggcccgctttcggcattgt

SEQ ID NO: 53006 - DNA, 20 bp, Neisseria gonorrhoeae
ggcccgctttcggcattgtg

SEQ ID NO: 53007 - DNA, 20 bp, Neisseria gonorrhoeae
cggcattgtgtaccgcagcc

SEQ ID NO: 53008 - DNA, 20 bp, Neisseria gonorrhoeae
ggcattgtgtaccgcagcca

SEQ ID NO: 53009 - DNA, 20 bp, Neisseria gonorrhoeae
gcgatgcggggcgtgccgcg

SEQ ID NO: 53010 - DNA, 20 bp, Neisseria gonorrhoeae
ggcgacttccatcgcgcctt

SEQ ID NO: 53011 - DNA, 20 bp, Neisseria gonorrhoeae
gcgacttccatcgcgccttc

SEQ ID NO: 53012 - DNA, 20 bp, Neisseria gonorrhoeae
catcgcgccttcttcgtcca

SEQ ID NO: 53013 - DNA, 20 bp, Neisseria gonorrhoeae
cgccgcgtgcgcgatttcgc

SEQ ID NO: 53014 - DNA, 20 bp, Neisseria gonorrhoeae
gtgccagccgcgcccggtcg

SEQ ID NO: 53015 - DNA, 20 bp, Neisseria gonorrhoeae
tgccagccgcgcccggtcga

SEQ ID NO: 53016 - DNA, 20 bp, Neisseria gonorrhoeae
gttcggcgataaggtgcgct

SEQ ID NO: 53017 - DNA, 20 bp, Neisseria gonorrhoeae
ttcggcgataaggtgcgctt

SEQ ID NO: 53018 - DNA, 20 bp, Neisseria gonorrhoeae
ggcgataaggtgcgcttttc

SEQ ID NO: 53019 - DNA, 20 bp, Neisseria gonorrhoeae
gtcgttttccaccatctgcc

SEQ ID NO: 53020 - DNA, 20 bp, Neisseria gonorrhoeae
tccaccatctgccgcatcag

SEQ ID NO: 53021 - DNA, 20 bp, Neisseria gonorrhoeae
ccaccatctgccgcatcagc

SEQ ID NO: 53022 - DNA, 20 bp, Neisseria gonorrhoeae
caccatctgccgcatcagct

SEQ ID NO: 53023 - DNA, 20 bp, Neisseria gonorrhoeae
atggtttcttcggcgatttc

SEQ ID NO: 53024 - DNA, 20 bp, Neisseria gonorrhoeae
cccgtgccgccgtatcgggc

SEQ ID NO: 53025 - DNA, 20 bp, Neisseria gonorrhoeae
tttgaccggtttccggacga

SEQ ID NO: 53026 - DNA, 20 bp, Neisseria gonorrhoeae
gaccggtttccggacgaact

SEQ ID NO: 53027 - DNA, 20 bp, Neisseria gonorrhoeae
accggtttccggacgaactg

SEQ ID NO: 53028 - DNA, 20 bp, Neisseria gonorrhoeae
ccggacgaactggaacattc

SEQ ID NO: 53029 - DNA, 20 bp, Neisseria gonorrhoeae
gaaatttgaaacatcaaaca

SEQ ID NO: 53030 - DNA, 20 bp, Neisseria gonorrhoeae
gaaacatcaaacaaatttgc

SEQ ID NO: 53031 - DNA, 20 bp, Neisseria gonorrhoeae
aaacatcaaacaaatttgca

SEQ ID NO: 53032 - DNA, 20 bp, Neisseria gonorrhoeae
gcagcattcgcaggcttaag

SEQ ID NO: 53033 - DNA, 20 bp, Neisseria gonorrhoeae
cagcattcgcaggcttaagc

SEQ ID NO: 53034 - DNA, 20 bp, Neisseria gonorrhoeae
ccgaaagtgaaaaccgcatc

SEQ ID NO: 53035 - DNA, 20 bp, Neisseria gonorrhoeae
ccggtttggcttggacggaa

SEQ ID NO: 53036 - DNA, 20 bp, Neisseria gonorrhoeae
ggcttggacggaagtcggcg

SEQ ID NO: 53037 - DNA, 20 bp, Neisseria gonorrhoeae
gcttggacggaagtcggcgg

SEQ ID NO: 53038 - DNA, 20 bp, Neisseria gonorrhoeae
gacggaagtcggcggcgaat

SEQ ID NO: 53039 - DNA, 20 bp, Neisseria gonorrhoeae
ggagagcagggcggttgaag

SEQ ID NO: 53040 - DNA, 20 bp, Neisseria gonorrhoeae
aagcgagcaacgccaaaatg

SEQ ID NO: 53041 - DNA, 20 bp, Neisseria gonorrhoeae
tggcttttgcttttttgcgc

SEQ ID NO: 53042 - DNA, 20 bp, Neisseria gonorrhoeae
ggcttttgcttttttgcgcg

SEQ ID NO: 53043 - DNA, 20 bp, Neisseria gonorrhoeae
gcttttgcttttttgcgcgc

SEQ ID NO: 53044 - DNA, 20 bp, Neisseria gonorrhoeae
gatagacaggaagtccattt

SEQ ID NO: 53045 - DNA, 20 bp, Neisseria gonorrhoeae
tgtccttggtcatagtgact

SEQ ID NO: 53046 - DNA, 20 bp, Neisseria gonorrhoeae
gtccttggtcatagtgactg

SEQ ID NO: 53047 - DNA, 20 bp, Neisseria gonorrhoeae
tccttggtcatagtgactgg

SEQ ID NO: 53048 - DNA, 20 bp, Neisseria gonorrhoeae
gtcatagtgactgggttatc

SEQ ID NO: 53049 - DNA, 20 bp, Neisseria gonorrhoeae
ccataatggtttcaatgaat

SEQ ID NO: 53050 - DNA, 20 bp, Neisseria gonorrhoeae
cataatggtttcaatgaatg

SEQ ID NO: 53051 - DNA, 20 bp, Neisseria gonorrhoeae
caatgaatggtttacgcttg

SEQ ID NO: 53052 - DNA, 20 bp, Neisseria gonorrhoeae
aatgaatggtttacgcttgg

SEQ ID NO: 53053 - DNA, 20 bp, Neisseria gonorrhoeae
acgcttggcggttgagaagc

SEQ ID NO: 53054 - DNA, 20 bp, Neisseria gonorrhoeae
tggcaagccattgtctgaca

SEQ ID NO: 53055 - DNA, 20 bp, Neisseria gonorrhoeae
tctgacatgtgaaggaacca

SEQ ID NO: 53056 - DNA, 20 bp, Neisseria gonorrhoeae
aaagaatgtccaggcgattt

SEQ ID NO: 53057 - DNA, 20 bp, Neisseria gonorrhoeae
cggcatgtgtactgtaagca

SEQ ID NO: 53058 - DNA, 20 bp, Neisseria gonorrhoeae
ggcatgtgtactgtaagcag

SEQ ID NO: 53059 - DNA, 20 bp, Neisseria gonorrhoeae
cggatttgaaaggtatcaag

SEQ ID NO: 53060 - DNA, 20 bp, Neisseria gonorrhoeae
gaaaggtatcaagcaccgtg

SEQ ID NO: 53061 - DNA, 20 bp, Neisseria gonorrhoeae
aaaggtatcaagcaccgtgt

SEQ ID NO: 53062 - DNA, 20 bp, Neisseria gonorrhoeae
gtgattacggaaatgcaaaa

SEQ ID NO: 53063 - DNA, 20 bp, Neisseria gonorrhoeae
cggaaatgcaaaaatcaagg

SEQ ID NO: 53064 - DNA, 20 bp, Neisseria gonorrhoeae
ttacggtagccacagtagtc

SEQ ID NO: 53065 - DNA, 20 bp, Neisseria gonorrhoeae
tacggtagccacagtagtcc

SEQ ID NO: 53066 - DNA, 20 bp, Neisseria gonorrhoeae
acggtagccacagtagtcca

SEQ ID NO: 53067 - DNA, 20 bp, Neisseria gonorrhoeae
cggtagccacagtagtccaa

SEQ ID NO: 53068 - DNA, 20 bp, Neisseria gonorrhoeae
cacgggcaataacttcccct

SEQ ID NO: 53069 - DNA, 20 bp, Neisseria gonorrhoeae
ggcattgcgtttgaaattag

SEQ ID NO: 53070 - DNA, 20 bp, Neisseria gonorrhoeae
cgtttgaaattaggtgaggc

SEQ ID NO: 53071 - DNA, 20 bp, Neisseria gonorrhoeae
gaaattaggtgaggcaactg

SEQ ID NO: 53072 - DNA, 20 bp, Neisseria gonorrhoeae
aaattaggtgaggcaactga

SEQ ID NO: 53073 - DNA, 20 bp, Neisseria gonorrhoeae
ggtgaggcaactgaaaaatt

SEQ ID NO: 53074 - DNA, 20 bp, Neisseria gonorrhoeae
tgattcatacacccaaacag

SEQ ID NO: 53075 - DNA, 20 bp, Neisseria gonorrhoeae
atacacccaaacagacaatg

SEQ ID NO: 53076 - DNA, 20 bp, Neisseria gonorrhoeae
taggcagaatctcttgctca

SEQ ID NO: 53077 - DNA, 20 bp, Neisseria gonorrhoeae
ctcaacagcagatttcaact

SEQ ID NO: 53078 - DNA, 20 bp, Neisseria gonorrhoeae
tcgaagttgaaatctgctgt

SEQ ID NO: 53079 - DNA, 20 bp, Neisseria gonorrhoeae
ggcttctttcggctcatcct

SEQ ID NO: 53080 - DNA, 20 bp, Neisseria gonorrhoeae
tttcggctcatcctctgcat

SEQ ID NO: 53081 - DNA, 20 bp, Neisseria gonorrhoeae
cggctcatcctctgcatcag

SEQ ID NO: 53082 - DNA, 20 bp, Neisseria gonorrhoeae
ggctcatcctctgcatcagc

SEQ ID NO: 53083 - DNA, 20 bp, Neisseria gonorrhoeae
agtaccatttactttggctg

SEQ ID NO: 53084 - DNA, 20 bp, Neisseria gonorrhoeae
gggggcggtgttggagccga

SEQ ID NO: 53085 - DNA, 20 bp, Neisseria gonorrhoeae
gagccgaatatcaaaagctg

SEQ ID NO: 53086 - DNA, 20 bp, Neisseria gonorrhoeae
ggatagcgaaggcgcaaggc

SEQ ID NO: 53087 - DNA, 20 bp, Neisseria gonorrhoeae
gatagcgaaggcgcaaggct

SEQ ID NO: 53088 - DNA, 20 bp, Neisseria gonorrhoeae
cgccttcgctatccaaagca

SEQ ID NO: 53089 - DNA, 20 bp, Neisseria gonorrhoeae
gaaaaacaagacatcctcta

SEQ ID NO: 53090 - DNA, 20 bp, Neisseria gonorrhoeae
aaaaacaagacatcctctac

SEQ ID NO: 53091 - DNA, 20 bp, Neisseria gonorrhoeae
ccgccttcttccacgacatc

SEQ ID NO: 53092 - DNA, 20 bp, Neisseria gonorrhoeae
ttccacgacatcgccaaagg

SEQ ID NO: 53093 - DNA, 20 bp, Neisseria gonorrhoeae
cacgacatcgccaaaggacg

SEQ ID NO: 53094 - DNA, 20 bp, Neisseria gonorrhoeae
ggatttggttgccgccggcg

SEQ ID NO: 53095 - DNA, 20 bp, Neisseria gonorrhoeae
gatttggttgccgccggcgc

SEQ ID NO: 53096 - DNA, 20 bp, Neisseria gonorrhoeae
ggttgccgccggcgcggatg

SEQ ID NO: 53097 - DNA, 20 bp, Neisseria gonorrhoeae
gttgccgccggcgcggatgc

SEQ ID NO: 53098 - DNA, 20 bp, Neisseria gonorrhoeae
ccgccggcgcggatgccgtc

SEQ ID NO: 53099 - DNA, 20 bp, Neisseria gonorrhoeae
ccgaagccctcaaaggcacg

SEQ ID NO: 53100 - DNA, 20 bp, Neisseria gonorrhoeae
cgctgattgccgacggcggc

SEQ ID NO: 53101 - DNA, 20 bp, Neisseria gonorrhoeae
ccgacggcggcatccgcttc

SEQ ID NO: 53102 - DNA, 20 bp, Neisseria gonorrhoeae
tccggcgacatcgccaaagc

SEQ ID NO: 53103 - DNA, 20 bp, Neisseria gonorrhoeae
ggcgatgtcgccggagaagc

SEQ ID NO: 53104 - DNA, 20 bp, Neisseria gonorrhoeae
cttgggcgcgatgagccaag

SEQ ID NO: 53105 - DNA, 20 bp, Neisseria gonorrhoeae
ggcgcgatgagccaaggttc

SEQ ID NO: 53106 - DNA, 20 bp, Neisseria gonorrhoeae
tgccgaccgctacttccaag

SEQ ID NO: 53107 - DNA, 20 bp, Neisseria gonorrhoeae
caagacaaaaccgacagcac

SEQ ID NO: 53108 - DNA, 20 bp, Neisseria gonorrhoeae
gtcggtgctgtcggttttgt

SEQ ID NO: 53109 - DNA, 20 bp, Neisseria gonorrhoeae
ccgaggctatcaggggcgca

SEQ ID NO: 53110 - DNA, 20 bp, Neisseria gonorrhoeae
cgaggctatcaggggcgcat

SEQ ID NO: 53111 - DNA, 20 bp, Neisseria gonorrhoeae
ggtcaccgtcgggcaaaccg

SEQ ID NO: 53112 - DNA, 20 bp, Neisseria gonorrhoeae
ggttcgatgcggacggtttg

SEQ ID NO: 53113 - DNA, 20 bp, Neisseria gonorrhoeae
gatgcggacggtttgcccga

SEQ ID NO: 53114 - DNA, 20 bp, Neisseria gonorrhoeae
cggcgatttcgccatacgga

SEQ ID NO: 53115 - DNA, 20 bp, Neisseria gonorrhoeae
ggcgatttcgccatacggac

SEQ ID NO: 53116 - DNA, 20 bp, Neisseria gonorrhoeae
cgccatacggacgggcatcg

SEQ ID NO: 53117 - DNA, 20 bp, Neisseria gonorrhoeae
gccatacggacgggcatcgt

SEQ ID NO: 53118 - DNA, 20 bp, Neisseria gonorrhoeae
gatgcgcccgtcgatttttg

SEQ ID NO: 53119 - DNA, 20 bp, Neisseria gonorrhoeae
gtctccggcggcccgatgga

SEQ ID NO: 53120 - DNA, 20 bp, Neisseria gonorrhoeae
gggttggatgtttgccacgc

SEQ ID NO: 53121 - DNA, 20 bp, Neisseria gonorrhoeae
gatgtttgccacgccgatga

SEQ ID NO: 53122 - DNA, 20 bp, Neisseria gonorrhoeae
gccacgccgatgaccttgcc

SEQ ID NO: 53123 - DNA, 20 bp, Neisseria gonorrhoeae
ccacgccgatgaccttgccc

SEQ ID NO: 53124 - DNA, 20 bp, Neisseria gonorrhoeae
gggtatgtttacggcaaact

SEQ ID NO: 53125 - DNA, 20 bp, Neisseria gonorrhoeae
acggcaaactcgatgaactg

SEQ ID NO: 53126 - DNA, 20 bp, Neisseria gonorrhoeae
cggcaaactcgatgaactgc

SEQ ID NO: 53127 - DNA, 20 bp, Neisseria gonorrhoeae
gtatttggcgacccacgcag

SEQ ID NO: 53128 - DNA, 20 bp, Neisseria gonorrhoeae
ccgggcagggacagaccgag

SEQ ID NO: 53129 - DNA, 20 bp, Neisseria gonorrhoeae
accggccgcgcgcgcgtgtt

SEQ ID NO: 53130 - DNA, 20 bp, Neisseria gonorrhoeae
ctggctttcaaacacgcgcg

SEQ ID NO: 53131 - DNA, 20 bp, Neisseria gonorrhoeae
caaacacgcgcgcgcggccg

SEQ ID NO: 53132 - DNA, 20 bp, Neisseria gonorrhoeae
aaacacgcgcgcgcggccgg

SEQ ID NO: 53133 - DNA, 20 bp, Neisseria gonorrhoeae
gaggatgctctcgtccacgc

SEQ ID NO: 53134 - DNA, 20 bp, Neisseria gonorrhoeae
catggtgttggaacgcggct

SEQ ID NO: 53135 - DNA, 20 bp, Neisseria gonorrhoeae
atggtgttggaacgcggctc

SEQ ID NO: 53136 - DNA, 20 bp, Neisseria gonorrhoeae
gaacgcggctcgaggacggc

SEQ ID NO: 53137 - DNA, 20 bp, Neisseria gonorrhoeae
gcgcaaaccttgaatcgtgg

SEQ ID NO: 53138 - DNA, 20 bp, Neisseria gonorrhoeae
aatcgtggtttcgatggcgg

SEQ ID NO: 53139 - DNA, 20 bp, Neisseria gonorrhoeae
caagacccaggcgagcatgg

SEQ ID NO: 53140 - DNA, 20 bp, Neisseria gonorrhoeae
gaatatgccggactcgcgcc

SEQ ID NO: 53141 - DNA, 20 bp, Neisseria gonorrhoeae
ctcatcggcggtgtaccgga

SEQ ID NO: 53142 - DNA, 20 bp, Neisseria gonorrhoeae
cctttcggattttggacggc

SEQ ID NO: 53143 - DNA, 20 bp, Neisseria gonorrhoeae
cggattttggacggcttcgt

SEQ ID NO: 53144 - DNA, 20 bp, Neisseria gonorrhoeae
ggattttggacggcttcgtc

SEQ ID NO: 53145 - DNA, 20 bp, Neisseria gonorrhoeae
tggacggcttcgtccctcac

SEQ ID NO: 53146 - DNA, 20 bp, Neisseria gonorrhoeae
ggacggcttcgtccctcacc

SEQ ID NO: 53147 - DNA, 20 bp, Neisseria gonorrhoeae
ggcgaccacgcgtccgcaca

SEQ ID NO: 53148 - DNA, 20 bp, Neisseria gonorrhoeae
tgggcaggggttgtgcggac

SEQ ID NO: 53149 - DNA, 20 bp, Neisseria gonorrhoeae
gggcaggggttgtgcggacg

SEQ ID NO: 53150 - DNA, 20 bp, Neisseria gonorrhoeae
ggcaggggttgtgcggacgc

SEQ ID NO: 53151 - DNA, 20 bp, Neisseria gonorrhoeae
tgcggacgcgtggtcgccca

SEQ ID NO: 53152 - DNA, 20 bp, Neisseria gonorrhoeae
tcgggatgttctttttcttc

SEQ ID NO: 53153 - DNA, 20 bp, Neisseria gonorrhoeae
cgggatgttctttttcttca

SEQ ID NO: 53154 - DNA, 20 bp, Neisseria gonorrhoeae
gggatgttctttttcttcat

SEQ ID NO: 53155 - DNA, 20 bp, Neisseria gonorrhoeae
tttttcttcatacaccggca

SEQ ID NO: 53156 - DNA, 20 bp, Neisseria gonorrhoeae
ttcttcatacaccggcaata

SEQ ID NO: 53157 - DNA, 20 bp, Neisseria gonorrhoeae
acggcatcggtcaggctttc

SEQ ID NO: 53158 - DNA, 20 bp, Neisseria gonorrhoeae
cggcttcgaccacggcttcg

SEQ ID NO: 53159 - DNA, 20 bp, Neisseria gonorrhoeae
ggcttcgaccacggcttcgg

SEQ ID NO: 53160 - DNA, 20 bp, Neisseria gonorrhoeae
gaccacggcttcggcgcggg

SEQ ID NO: 53161 - DNA, 20 bp, Neisseria gonorrhoeae
ggcgcgggcgcgtgccgcca

SEQ ID NO: 53162 - DNA, 20 bp, Neisseria gonorrhoeae
cgcgggatgattttttccgc

SEQ ID NO: 53163 - DNA, 20 bp, Neisseria gonorrhoeae
tttccgccaagccgccgtag

SEQ ID NO: 53164 - DNA, 20 bp, Neisseria gonorrhoeae
ttccgccaagccgccgtagg

SEQ ID NO: 53165 - DNA, 20 bp, Neisseria gonorrhoeae
tccgccaagccgccgtaggt

SEQ ID NO: 53166 - DNA, 20 bp, Neisseria gonorrhoeae
ccgccaagccgccgtaggtt

SEQ ID NO: 53167 - DNA, 20 bp, Neisseria gonorrhoeae
tccagcccgtaggcgattgc

SEQ ID NO: 53168 - DNA, 20 bp, Neisseria gonorrhoeae
cggcggcggtaggttcgttg

SEQ ID NO: 53169 - DNA, 20 bp, Neisseria gonorrhoeae
gttgagcaggcgcaatacgt

SEQ ID NO: 53170 - DNA, 20 bp, Neisseria gonorrhoeae
agcaggcgcaatacgttcaa

SEQ ID NO: 53171 - DNA, 20 bp, Neisseria gonorrhoeae
aaaccggccagacgcgcggc

SEQ ID NO: 53172 - DNA, 20 bp, Neisseria gonorrhoeae
tggcggcggtttattacgcg

SEQ ID NO: 53173 - DNA, 20 bp, Neisseria gonorrhoeae
ttgggcttttttatcggcat

SEQ ID NO: 53174 - DNA, 20 bp, Neisseria gonorrhoeae
tgggcttttttatcggcatc

SEQ ID NO: 53175 - DNA, 20 bp, Neisseria gonorrhoeae
gggcttttttatcggcatca

SEQ ID NO: 53176 - DNA, 20 bp, Neisseria gonorrhoeae
ggcttttttatcggcatcag

SEQ ID NO: 53177 - DNA, 20 bp, Neisseria gonorrhoeae
gatgccgccatacttgccac

SEQ ID NO: 53178 - DNA, 20 bp, Neisseria gonorrhoeae
ccaccgcgccctaccacgcc

SEQ ID NO: 53179 - DNA, 20 bp, Neisseria gonorrhoeae
gggcaggagcgcggcggcgt

SEQ ID NO: 53180 - DNA, 20 bp, Neisseria gonorrhoeae
gccgttgacgaggacttttc

SEQ ID NO: 53181 - DNA, 20 bp, Neisseria gonorrhoeae
acgaggacttttccgtccgg

SEQ ID NO: 53182 - DNA, 20 bp, Neisseria gonorrhoeae
cactgaccggctgtgcgacc

SEQ ID NO: 53183 - DNA, 20 bp, Neisseria gonorrhoeae
actgaccggctgtgcgaccg

SEQ ID NO: 53184 - DNA, 20 bp, Neisseria gonorrhoeae
caaaagtcgcctcctgcaat

SEQ ID NO: 53185 - DNA, 20 bp, Neisseria gonorrhoeae
cgtattgcaggaggcgactt

SEQ ID NO: 53186 - DNA, 20 bp, Neisseria gonorrhoeae
caggaggcgacttttgcaac

SEQ ID NO: 53187 - DNA, 20 bp, Neisseria gonorrhoeae
ctgccggttttttccccttc

SEQ ID NO: 53188 - DNA, 20 bp, Neisseria gonorrhoeae
tttccccttccctgcggacg

SEQ ID NO: 53189 - DNA, 20 bp, Neisseria gonorrhoeae
ttccccttccctgcggacgg

SEQ ID NO: 53190 - DNA, 20 bp, Neisseria gonorrhoeae
tccccttccctgcggacggt

SEQ ID NO: 53191 - DNA, 20 bp, Neisseria gonorrhoeae
ccccttccctgcggacggtt

SEQ ID NO: 53192 - DNA, 20 bp, Neisseria gonorrhoeae
ggcagacataatctcgtaag

SEQ ID NO: 53193 - DNA, 20 bp, Neisseria gonorrhoeae
cgcggtgtttcagcaccccg

SEQ ID NO: 53194 - DNA, 20 bp, Neisseria gonorrhoeae
gcggtgtttcagcaccccgt

SEQ ID NO: 53195 - DNA, 20 bp, Neisseria gonorrhoeae
cagcaccccgtcctgatgga

SEQ ID NO: 53196 - DNA, 20 bp, Neisseria gonorrhoeae
agcaccccgtcctgatggat

SEQ ID NO: 53197 - DNA, 20 bp, Neisseria gonorrhoeae
cccgcctgacggatgtcccg

SEQ ID NO: 53198 - DNA, 20 bp, Neisseria gonorrhoeae
atttggtaatggttttcgca

SEQ ID NO: 53199 - DNA, 20 bp, Neisseria gonorrhoeae
ggtaatggttttcgcaatcg

SEQ ID NO: 53200 - DNA, 20 bp, Neisseria gonorrhoeae
gtaatggttttcgcaatcgc

SEQ ID NO: 53201 - DNA, 20 bp, Neisseria gonorrhoeae
tcgcaatcgcattgaccgcc

SEQ ID NO: 53202 - DNA, 20 bp, Neisseria gonorrhoeae
caatccgcacgcgccatcgt

SEQ ID NO: 53203 - DNA, 20 bp, Neisseria gonorrhoeae
aatccgcacgcgccatcgtt

SEQ ID NO: 53204 - DNA, 20 bp, Neisseria gonorrhoeae
ccgccctgaaaacggggttg

SEQ ID NO: 53205 - DNA, 20 bp, Neisseria gonorrhoeae
gtgccaaccccgttttcagg

SEQ ID NO: 53206 - DNA, 20 bp, Neisseria gonorrhoeae
tgccaaccccgttttcaggg

SEQ ID NO: 53207 - DNA, 20 bp, Neisseria gonorrhoeae
tcggcaggtgttcggatacc

SEQ ID NO: 53208 - DNA, 20 bp, Neisseria gonorrhoeae
ggataccgcaccggtctctt

SEQ ID NO: 53209 - DNA, 20 bp, Neisseria gonorrhoeae
cgattggaacgccccttcat

SEQ ID NO: 53210 - DNA, 20 bp, Neisseria gonorrhoeae
gaacgccccttcatccgctt

SEQ ID NO: 53211 - DNA, 20 bp, Neisseria gonorrhoeae
atccgcttccgtatccgata

SEQ ID NO: 53212 - DNA, 20 bp, Neisseria gonorrhoeae
agacggcataggcagacaaa

SEQ ID NO: 53213 - DNA, 20 bp, Neisseria gonorrhoeae
ccaacatcctccccctttcc

SEQ ID NO: 53214 - DNA, 20 bp, Neisseria gonorrhoeae
caacatcctccccctttcca

SEQ ID NO: 53215 - DNA, 20 bp, Neisseria gonorrhoeae
ccatcggtgcaatattcggc

SEQ ID NO: 53216 - DNA, 20 bp, Neisseria gonorrhoeae
catcggtgcaatattcggca

SEQ ID NO: 53217 - DNA, 20 bp, Neisseria gonorrhoeae
cctccgccaattctcgcagc

SEQ ID NO: 53218 - DNA, 20 bp, Neisseria gonorrhoeae
ctccgccaattctcgcagcg

SEQ ID NO: 53219 - DNA, 20 bp, Neisseria gonorrhoeae
tcgcagcgcacacgctgcca

SEQ ID NO: 53220 - DNA, 20 bp, Neisseria gonorrhoeae
gcggaggaaacgccttatgt

SEQ ID NO: 53221 - DNA, 20 bp, Neisseria gonorrhoeae
attgccgttgggcagcctga

SEQ ID NO: 53222 - DNA, 20 bp, Neisseria gonorrhoeae
ccgttgggcagcctgacctt

SEQ ID NO: 53223 - DNA, 20 bp, Neisseria gonorrhoeae
ggcagcctgaccttatccct

SEQ ID NO: 53224 - DNA, 20 bp, Neisseria gonorrhoeae
gtacaatctcgaaggcagcg

SEQ ID NO: 53225 - DNA, 20 bp, Neisseria gonorrhoeae
tacaatctcgaaggcagcga

SEQ ID NO: 53226 - DNA, 20 bp, Neisseria gonorrhoeae
tgcgcctgtcggagcagggc

SEQ ID NO: 53227 - DNA, 20 bp, Neisseria gonorrhoeae
gcgcctgtcggagcagggcg

SEQ ID NO: 53228 - DNA, 20 bp, Neisseria gonorrhoeae
cgcctgtcggagcagggcga

SEQ ID NO: 53229 - DNA, 20 bp, Neisseria gonorrhoeae
tgctgtccgtcgtttccgcc

SEQ ID NO: 53230 - DNA, 20 bp, Neisseria gonorrhoeae
gctgtccgtcgtttccgcct

SEQ ID NO: 53231 - DNA, 20 bp, Neisseria gonorrhoeae
ctgtccgtcgtttccgcctg

SEQ ID NO: 53232 - DNA, 20 bp, Neisseria gonorrhoeae
ccgcctgtaccgaaatcaac

SEQ ID NO: 53233 - DNA, 20 bp, Neisseria gonorrhoeae
cgcctgtaccgaaatcaacg

SEQ ID NO: 53234 - DNA, 20 bp, Neisseria gonorrhoeae
cgccgccatgaccactcgcg

SEQ ID NO: 53235 - DNA, 20 bp, Neisseria gonorrhoeae
aacgaaaccgacgctcgcgt

SEQ ID NO: 53236 - DNA, 20 bp, Neisseria gonorrhoeae
acgaaaccgacgctcgcgta

SEQ ID NO: 53237 - DNA, 20 bp, Neisseria gonorrhoeae
tcgaacttggttgccgatgt

SEQ ID NO: 53238 - DNA, 20 bp, Neisseria gonorrhoeae
gacaatacgcgagcgtcggt

SEQ ID NO: 53239 - DNA, 20 bp, Neisseria gonorrhoeae
acggaaactaaacgcccgat

SEQ ID NO: 53240 - DNA, 20 bp, Neisseria gonorrhoeae
cggaaactaaacgcccgatg

SEQ ID NO: 53241 - DNA, 20 bp, Neisseria gonorrhoeae
ccatacaaaatgccgtctga

SEQ ID NO: 53242 - DNA, 20 bp, Neisseria gonorrhoeae
catacaaaatgccgtctgaa

SEQ ID NO: 53243 - DNA, 20 bp, Neisseria gonorrhoeae
tccagacggcattttttgtt

SEQ ID NO: 53244 - DNA, 20 bp, Neisseria gonorrhoeae
cgccaaagctgcgccatccc

SEQ ID NO: 53245 - DNA, 20 bp, Neisseria gonorrhoeae
ggcgcaactgggtgcggatg

SEQ ID NO: 53246 - DNA, 20 bp, Neisseria gonorrhoeae
gcgcaactgggtgcggatgt

SEQ ID NO: 53247 - DNA, 20 bp, Neisseria gonorrhoeae
gaggcgttcgcgggcgcgtt

SEQ ID NO: 53248 - DNA, 20 bp, Neisseria gonorrhoeae
gcgggcgcgttcgtagctgt

SEQ ID NO: 53249 - DNA, 20 bp, Neisseria gonorrhoeae
ccgacttactgcattcggaa

SEQ ID NO: 53250 - DNA, 20 bp, Neisseria gonorrhoeae
ctgcattcggaaacggtttc

SEQ ID NO: 53251 - DNA, 20 bp, Neisseria gonorrhoeae
ggaaacggtttcggaaagat

SEQ ID NO: 53252 - DNA, 20 bp, Neisseria gonorrhoeae
cggaaagattacccggtcag

SEQ ID NO: 53253 - DNA, 20 bp, Neisseria gonorrhoeae
ggaaagattacccggtcaga

SEQ ID NO: 53254 - DNA, 20 bp, Neisseria gonorrhoeae
cacaaaaccgcattcaggaa

SEQ ID NO: 53255 - DNA, 20 bp, Neisseria gonorrhoeae
aggaaaaagcgtggatacgc

SEQ ID NO: 53256 - DNA, 20 bp, Neisseria gonorrhoeae
caaaccgcgccgtatcaggc

SEQ ID NO: 53257 - DNA, 20 bp, Neisseria gonorrhoeae
gcaaggccgaagacattact

SEQ ID NO: 53258 - DNA, 20 bp, Neisseria gonorrhoeae
caaggccgaagacattactg

SEQ ID NO: 53259 - DNA, 20 bp, Neisseria gonorrhoeae
ggagcgaaccggcgcaagaa

SEQ ID NO: 53260 - DNA, 20 bp, Neisseria gonorrhoeae
gagcgaaccggcgcaagaac

SEQ ID NO: 53261 - DNA, 20 bp, Neisseria gonorrhoeae
ttgcgccggttcgctccaaa

SEQ ID NO: 53262 - DNA, 20 bp, Neisseria gonorrhoeae
cgccggttcgctccaaaggt

SEQ ID NO: 53263 - DNA, 20 bp, Neisseria gonorrhoeae
gctccaaaggtattcgagat

SEQ ID NO: 53264 - DNA, 20 bp, Neisseria gonorrhoeae
tttgccgatttcgcgcaaga

SEQ ID NO: 53265 - DNA, 20 bp, Neisseria gonorrhoeae
gccgatttcgcgcaagacgg

SEQ ID NO: 53266 - DNA, 20 bp, Neisseria gonorrhoeae
ccgatttcgcgcaagacggc

SEQ ID NO: 53267 - DNA, 20 bp, Neisseria gonorrhoeae
cgcgcaagacggcgattcgt

SEQ ID NO: 53268 - DNA, 20 bp, Neisseria gonorrhoeae
gcgcaagacggcgattcgtg

SEQ ID NO: 53269 - DNA, 20 bp, Neisseria gonorrhoeae
cgccaatgcggcttgggggt

SEQ ID NO: 53270 - DNA, 20 bp, Neisseria gonorrhoeae
ggggttggcggcttcgactg

SEQ ID NO: 53271 - DNA, 20 bp, Neisseria gonorrhoeae
gcggcttcgactgtttcggg

SEQ ID NO: 53272 - DNA, 20 bp, Neisseria gonorrhoeae
gactgtttcgggcaattcgg

SEQ ID NO: 53273 - DNA, 20 bp, Neisseria gonorrhoeae
cgggcaattcggtatagccg

SEQ ID NO: 53274 - DNA, 20 bp, Neisseria gonorrhoeae
ttgggcatcgaagacggcaa

SEQ ID NO: 53275 - DNA, 20 bp, Neisseria gonorrhoeae
ggcatcgaagacggcaaaag

SEQ ID NO: 53276 - DNA, 20 bp, Neisseria gonorrhoeae
ggcatcttcgggcgcggcgg

SEQ ID NO: 53277 - DNA, 20 bp, Neisseria gonorrhoeae
gggcgcggcggggttgtgga

SEQ ID NO: 53278 - DNA, 20 bp, Neisseria gonorrhoeae
tggatgatggggatgctttt

SEQ ID NO: 53279 - DNA, 20 bp, Neisseria gonorrhoeae
ggcgttttcggacaaatcgc

SEQ ID NO: 53280 - DNA, 20 bp, Neisseria gonorrhoeae
tcggacaaatcgccgtgcga

SEQ ID NO: 53281 - DNA, 20 bp, Neisseria gonorrhoeae
cggacaaatcgccgtgcgat

SEQ ID NO: 53282 - DNA, 20 bp, Neisseria gonorrhoeae
ggacaaatcgccgtgcgatc

SEQ ID NO: 53283 - DNA, 20 bp, Neisseria gonorrhoeae
ggcaatcgcttcgatcactt

SEQ ID NO: 53284 - DNA, 20 bp, Neisseria gonorrhoeae
ggtcgatgcgttgcggattg

SEQ ID NO: 53285 - DNA, 20 bp, Neisseria gonorrhoeae
gtcgatgcgttgcggattgc

SEQ ID NO: 53286 - DNA, 20 bp, Neisseria gonorrhoeae
cggattgccggcgccgatgt

SEQ ID NO: 53287 - DNA, 20 bp, Neisseria gonorrhoeae
ccggcgccgatgtcgaatat

SEQ ID NO: 53288 - DNA, 20 bp, Neisseria gonorrhoeae
gttgccgagatattcgacat

SEQ ID NO: 53289 - DNA, 20 bp, Neisseria gonorrhoeae
ggggcgaaaacttcgtcgaa

SEQ ID NO: 53290 - DNA, 20 bp, Neisseria gonorrhoeae
gggcgaaaacttcgtcgaag

SEQ ID NO: 53291 - DNA, 20 bp, Neisseria gonorrhoeae
gtcgaagtctcgcgcccgaa

SEQ ID NO: 53292 - DNA, 20 bp, Neisseria gonorrhoeae
gatttggatgcgaaccatat

SEQ ID NO: 53293 - DNA, 20 bp, Neisseria gonorrhoeae
atttggatgcgaaccatatc

SEQ ID NO: 53294 - DNA, 20 bp, Neisseria gonorrhoeae
ctgcgagccttgtgtgcggc

SEQ ID NO: 53295 - DNA, 20 bp, Neisseria gonorrhoeae
tgtgcggccgatgtggctga

SEQ ID NO: 53296 - DNA, 20 bp, Neisseria gonorrhoeae
gatttgccggactgtctgtt

SEQ ID NO: 53297 - DNA, 20 bp, Neisseria gonorrhoeae
gccggactgtctgtttgggt

SEQ ID NO: 53298 - DNA, 20 bp, Neisseria gonorrhoeae
ccggactgtctgtttgggtt

SEQ ID NO: 53299 - DNA, 20 bp, Neisseria gonorrhoeae
tgtttgtcgagggtaacgcg

SEQ ID NO: 53300 - DNA, 20 bp, Neisseria gonorrhoeae
gtcgagggtaacgcggtagg

SEQ ID NO: 53301 - DNA, 20 bp, Neisseria gonorrhoeae
tcgagggtaacgcggtaggc

SEQ ID NO: 53302 - DNA, 20 bp, Neisseria gonorrhoeae
gggtgtggtatcggcgaggg

SEQ ID NO: 53303 - DNA, 20 bp, Neisseria gonorrhoeae
tgcgattttggggctttcga

SEQ ID NO: 53304 - DNA, 20 bp, Neisseria gonorrhoeae
tgggcggaatggcttgccca

SEQ ID NO: 53305 - DNA, 20 bp, Neisseria gonorrhoeae
cccagtagcggtcgaagtcg

SEQ ID NO: 53306 - DNA, 20 bp, Neisseria gonorrhoeae
gccgacgacgctgccggtgg

SEQ ID NO: 53307 - DNA, 20 bp, Neisseria gonorrhoeae
gaccgctactgggcaagcca

SEQ ID NO: 53308 - DNA, 20 bp, Neisseria gonorrhoeae
cgcccacaacgccacgcgca

SEQ ID NO: 53309 - DNA, 20 bp, Neisseria gonorrhoeae
tcggcggtaaaggatttgtt

SEQ ID NO: 53310 - DNA, 20 bp, Neisseria gonorrhoeae
gttgtgcatgcggcggttga

SEQ ID NO: 53311 - DNA, 20 bp, Neisseria gonorrhoeae
ttgtgcatgcggcggttgag

SEQ ID NO: 53312 - DNA, 20 bp, Neisseria gonorrhoeae
tgcatgcggcggttgaggcg

SEQ ID NO: 53313 - DNA, 20 bp, Neisseria gonorrhoeae
aggcgggggaagtcggtcag

SEQ ID NO: 53314 - DNA, 20 bp, Neisseria gonorrhoeae
catgagcggtgcaatcagcg

SEQ ID NO: 53315 - DNA, 20 bp, Neisseria gonorrhoeae
atgagcggtgcaatcagcgg

SEQ ID NO: 53316 - DNA, 20 bp, Neisseria gonorrhoeae
gaccagcagcgaagacaggg

SEQ ID NO: 53317 - DNA, 20 bp, Neisseria gonorrhoeae
accagcagcgaagacagggc

SEQ ID NO: 53318 - DNA, 20 bp, Neisseria gonorrhoeae
gctgctggtcaaaccgctga

SEQ ID NO: 53319 - DNA, 20 bp, Neisseria gonorrhoeae
acgctcgcttacggtgcgca

SEQ ID NO: 53320 - DNA, 20 bp, Neisseria gonorrhoeae
cggtgcgcacggtccgcgtg

SEQ ID NO: 53321 - DNA, 20 bp, Neisseria gonorrhoeae
ggtcatcctcgccattttgc

SEQ ID NO: 53322 - DNA, 20 bp, Neisseria gonorrhoeae
gtcatcctcgccattttgcc

SEQ ID NO: 53323 - DNA, 20 bp, Neisseria gonorrhoeae
gtaagcatcgccatttttac

SEQ ID NO: 53324 - DNA, 20 bp, Neisseria gonorrhoeae
ttaccggcaaaggaagcagt

SEQ ID NO: 53325 - DNA, 20 bp, Neisseria gonorrhoeae
taccggcaaaggaagcagta

SEQ ID NO: 53326 - DNA, 20 bp, Neisseria gonorrhoeae
accggcaaaggaagcagtac

SEQ ID NO: 53327 - DNA, 20 bp, Neisseria gonorrhoeae
ccggcaaaggaagcagtacc

SEQ ID NO: 53328 - DNA, 20 bp, Neisseria gonorrhoeae
tccgttgacgacgatgctgt

SEQ ID NO: 53329 - DNA, 20 bp, Neisseria gonorrhoeae
acgacgatgctgtctttgtc

SEQ ID NO: 53330 - DNA, 20 bp, Neisseria gonorrhoeae
gtccaaatgcacgccgaagg

SEQ ID NO: 53331 - DNA, 20 bp, Neisseria gonorrhoeae
tccaaatgcacgccgaaggg

SEQ ID NO: 53332 - DNA, 20 bp, Neisseria gonorrhoeae
tgcggcggcaatcaagagtt

SEQ ID NO: 53333 - DNA, 20 bp, Neisseria gonorrhoeae
ccacatgtccagccactttg

SEQ ID NO: 53334 - DNA, 20 bp, Neisseria gonorrhoeae
gcccaaacatcgccccgata

SEQ ID NO: 53335 - DNA, 20 bp, Neisseria gonorrhoeae
cccaaacatcgccccgatag

SEQ ID NO: 53336 - DNA, 20 bp, Neisseria gonorrhoeae
gggggcgtttttttcgggca

SEQ ID NO: 53337 - DNA, 20 bp, Neisseria gonorrhoeae
ttttcgggcagcaccagccg

SEQ ID NO: 53338 - DNA, 20 bp, Neisseria gonorrhoeae
aagtctattacctgaccggc

SEQ ID NO: 53339 - DNA, 20 bp, Neisseria gonorrhoeae
cctgaccggcaggccgatga

SEQ ID NO: 53340 - DNA, 20 bp, Neisseria gonorrhoeae
gaagggcagggtgtgttcgg

SEQ ID NO: 53341 - DNA, 20 bp, Neisseria gonorrhoeae
gggctgtccgttcaggtgcg

SEQ ID NO: 53342 - DNA, 20 bp, Neisseria gonorrhoeae
aggtgcgcgctcatcggcct

SEQ ID NO: 53343 - DNA, 20 bp, Neisseria gonorrhoeae
gcattgatgtttgccggaac

SEQ ID NO: 53344 - DNA, 20 bp, Neisseria gonorrhoeae
atgtttgccggaacatggct

SEQ ID NO: 53345 - DNA, 20 bp, Neisseria gonorrhoeae
gccggaacatggctgcttgc

SEQ ID NO: 53346 - DNA, 20 bp, Neisseria gonorrhoeae
ccggaacatggctgcttgcc

SEQ ID NO: 53347 - DNA, 20 bp, Neisseria gonorrhoeae
cctatgccggcggctatcaa

SEQ ID NO: 53348 - DNA, 20 bp, Neisseria gonorrhoeae
accattgcaatctgcccgac

SEQ ID NO: 53349 - DNA, 20 bp, Neisseria gonorrhoeae
ccattgcaatctgcccgaca

SEQ ID NO: 53350 - DNA, 20 bp, Neisseria gonorrhoeae
caatctgcccgacagcacgg

SEQ ID NO: 53351 - DNA, 20 bp, Neisseria gonorrhoeae
gcgtgtcaggcggcgcatac

SEQ ID NO: 53352 - DNA, 20 bp, Neisseria gonorrhoeae
gttgcccatcacccacgccg

SEQ ID NO: 53353 - DNA, 20 bp, Neisseria gonorrhoeae
cccaagccgccgaaaaagcc

SEQ ID NO: 53354 - DNA, 20 bp, Neisseria gonorrhoeae
ccaagccgccgaaaaagccg

SEQ ID NO: 53355 - DNA, 20 bp, Neisseria gonorrhoeae
caacaaaccttcccaagaag

SEQ ID NO: 53356 - DNA, 20 bp, Neisseria gonorrhoeae
ttgggaaggtttgttgtaat

SEQ ID NO: 53357 - DNA, 20 bp, Neisseria gonorrhoeae
ggaaggtttgttgtaatagg

SEQ ID NO: 53358 - DNA, 20 bp, Neisseria gonorrhoeae
ttaccgtagccgccaacgcc

SEQ ID NO: 53359 - DNA, 20 bp, Neisseria gonorrhoeae
ccgtagccgccaacgccgcc

SEQ ID NO: 53360 - DNA, 20 bp, Neisseria gonorrhoeae
gccgatatgtgccgtgccgc

SEQ ID NO: 53361 - DNA, 20 bp, Neisseria gonorrhoeae
ccgatatgtgccgtgccgcg

SEQ ID NO: 53362 - DNA, 20 bp, Neisseria gonorrhoeae
gcgtgcaagggcaatgtcgc

SEQ ID NO: 53363 - DNA, 20 bp, Neisseria gonorrhoeae
gggcaggcagaaatatccga

SEQ ID NO: 53364 - DNA, 20 bp, Neisseria gonorrhoeae
acaggctgggggcttttaaa

SEQ ID NO: 53365 - DNA, 20 bp, Neisseria gonorrhoeae
caggctgggggcttttaaaa

SEQ ID NO: 53366 - DNA, 20 bp, Neisseria gonorrhoeae
caaaatcttttaaaagcccc

SEQ ID NO: 53367 - DNA, 20 bp, Neisseria gonorrhoeae
aaaatcttttaaaagccccc

SEQ ID NO: 53368 - DNA, 20 bp, Neisseria gonorrhoeae
cgtgcgccaacgcaaccaga

SEQ ID NO: 53369 - DNA, 20 bp, Neisseria gonorrhoeae
gtgcgccaacgcaaccagac

SEQ ID NO: 53370 - DNA, 20 bp, Neisseria gonorrhoeae
gtttcgccgctcatggcgga

SEQ ID NO: 53371 - DNA, 20 bp, Neisseria gonorrhoeae
cgccgctcatggcggatacg

SEQ ID NO: 53372 - DNA, 20 bp, Neisseria gonorrhoeae
gccgctcatggcggatacga

SEQ ID NO: 53373 - DNA, 20 bp, Neisseria gonorrhoeae
ttggcaaccagcaggtgttt

SEQ ID NO: 53374 - DNA, 20 bp, Neisseria gonorrhoeae
gcaaccagcaggtgtttgac

SEQ ID NO: 53375 - DNA, 20 bp, Neisseria gonorrhoeae
gacggtatttcccacaccca

SEQ ID NO: 53376 - DNA, 20 bp, Neisseria gonorrhoeae
acggtatttcccacacccag

SEQ ID NO: 53377 - DNA, 20 bp, Neisseria gonorrhoeae
cccacacccagttcccgggc

SEQ ID NO: 53378 - DNA, 20 bp, Neisseria gonorrhoeae
ggcggcatcgccagactcta

SEQ ID NO: 53379 - DNA, 20 bp, Neisseria gonorrhoeae
acgcacttttcacaggcaca

SEQ ID NO: 53380 - DNA, 20 bp, Neisseria gonorrhoeae
tcacaggcacacgtctgcgt

SEQ ID NO: 53381 - DNA, 20 bp, Neisseria gonorrhoeae
cacaggcacacgtctgcgtg

SEQ ID NO: 53382 - DNA, 20 bp, Neisseria gonorrhoeae
acaggcacacgtctgcgtgg

SEQ ID NO: 53383 - DNA, 20 bp, Neisseria gonorrhoeae
ggacgcgctgccgcgtgcgg

SEQ ID NO: 53384 - DNA, 20 bp, Neisseria gonorrhoeae
gacgcgctgccgcgtgcggg

SEQ ID NO: 53385 - DNA, 20 bp, Neisseria gonorrhoeae
cgcgtgggcttacctgccgc

SEQ ID NO: 53386 - DNA, 20 bp, Neisseria gonorrhoeae
gcgtgggcttacctgccgct

SEQ ID NO: 53387 - DNA, 20 bp, Neisseria gonorrhoeae
cctgccgctggaaattgcag

SEQ ID NO: 53388 - DNA, 20 bp, Neisseria gonorrhoeae
cggagaaatccgaatcagcc

SEQ ID NO: 53389 - DNA, 20 bp, Neisseria gonorrhoeae
ggagaaatccgaatcagcct

SEQ ID NO: 53390 - DNA, 20 bp, Neisseria gonorrhoeae
agacggcattttcggcacac

SEQ ID NO: 53391 - DNA, 20 bp, Neisseria gonorrhoeae
tcggcacacggggcgggcgc

SEQ ID NO: 53392 - DNA, 20 bp, Neisseria gonorrhoeae
cggcacacggggcgggcgcg

SEQ ID NO: 53393 - DNA, 20 bp, Neisseria gonorrhoeae
acctcgccaaaaaactcggc

SEQ ID NO: 53394 - DNA, 20 bp, Neisseria gonorrhoeae
cctcgccaaaaaactcggca

SEQ ID NO: 53395 - DNA, 20 bp, Neisseria gonorrhoeae
tttggcgaggtaaacgttgc

SEQ ID NO: 53396 - DNA, 20 bp, Neisseria gonorrhoeae
ttggcgaggtaaacgttgct

SEQ ID NO: 53397 - DNA, 20 bp, Neisseria gonorrhoeae
tggcgaggtaaacgttgctt

SEQ ID NO: 53398 - DNA, 20 bp, Neisseria gonorrhoeae
gggcgttgccctgaccgacg

SEQ ID NO: 53399 - DNA, 20 bp, Neisseria gonorrhoeae
ggcgttgccctgaccgacgt

SEQ ID NO: 53400 - DNA, 20 bp, Neisseria gonorrhoeae
ccctgaccgacgtggtcggt

SEQ ID NO: 53401 - DNA, 20 bp, Neisseria gonorrhoeae
ctgcgcgatttcgacctcta

SEQ ID NO: 53402 - DNA, 20 bp, Neisseria gonorrhoeae
gcgaaatagaggtcgaaatc

SEQ ID NO: 53403 - DNA, 20 bp, Neisseria gonorrhoeae
ctcgcctacctgcgccaagt

SEQ ID NO: 53404 - DNA, 20 bp, Neisseria gonorrhoeae
gcgcaggtaggcgaggaagg

SEQ ID NO: 53405 - DNA, 20 bp, Neisseria gonorrhoeae
ttggtcatggttttgcccgg

SEQ ID NO: 53406 - DNA, 20 bp, Neisseria gonorrhoeae
gtcatggttttgcccggcga

SEQ ID NO: 53407 - DNA, 20 bp, Neisseria gonorrhoeae
tgcccggcgagtcggagagc

SEQ ID NO: 53408 - DNA, 20 bp, Neisseria gonorrhoeae
ctcgcccaatctggcgaagg

SEQ ID NO: 53409 - DNA, 20 bp, Neisseria gonorrhoeae
ccttcgccagattgggcgag

SEQ ID NO: 53410 - DNA, 20 bp, Neisseria gonorrhoeae
cttcgccagattgggcgagg

SEQ ID NO: 53411 - DNA, 20 bp, Neisseria gonorrhoeae
gccagattgggcgaggaata

SEQ ID NO: 53412 - DNA, 20 bp, Neisseria gonorrhoeae
ggcgaggaatagtcgatgac

SEQ ID NO: 53413 - DNA, 20 bp, Neisseria gonorrhoeae
accaagccgccaccctgttc

SEQ ID NO: 53414 - DNA, 20 bp, Neisseria gonorrhoeae
ccaagccgccaccctgttca

SEQ ID NO: 53415 - DNA, 20 bp, Neisseria gonorrhoeae
agccgcttctacgaagcttg

SEQ ID NO: 53416 - DNA, 20 bp, Neisseria gonorrhoeae
tacgaagcttgcccgatttt

SEQ ID NO: 53417 - DNA, 20 bp, Neisseria gonorrhoeae
cccgattttgaaagccgaag

SEQ ID NO: 53418 - DNA, 20 bp, Neisseria gonorrhoeae
tgggttttggcactgctgac

SEQ ID NO: 53419 - DNA, 20 bp, Neisseria gonorrhoeae
gggttttggcactgctgacc

SEQ ID NO: 53420 - DNA, 20 bp, Neisseria gonorrhoeae
ggttttggcactgctgaccg

SEQ ID NO: 53421 - DNA, 20 bp, Neisseria gonorrhoeae
tggcactgctgaccgccacc

SEQ ID NO: 53422 - DNA, 20 bp, Neisseria gonorrhoeae
ggcactgctgaccgccaccg

SEQ ID NO: 53423 - DNA, 20 bp, Neisseria gonorrhoeae
tcgagtacgccggtgatttt

SEQ ID NO: 53424 - DNA, 20 bp, Neisseria gonorrhoeae
cgagtacgccggtgattttg

SEQ ID NO: 53425 - DNA, 20 bp, Neisseria gonorrhoeae
gagtacgccggtgattttgt

SEQ ID NO: 53426 - DNA, 20 bp, Neisseria gonorrhoeae
tgttgatttcatcttccatc

SEQ ID NO: 53427 - DNA, 20 bp, Neisseria gonorrhoeae
gttgatttcatcttccatcg

SEQ ID NO: 53428 - DNA, 20 bp, Neisseria gonorrhoeae
atggtcgaaccggtaccgat

SEQ ID NO: 53429 - DNA, 20 bp, Neisseria gonorrhoeae
gttttcgggtacgaattcga

SEQ ID NO: 53430 - DNA, 20 bp, Neisseria gonorrhoeae
tcgggtacgaattcgactgc

SEQ ID NO: 53431 - DNA, 20 bp, Neisseria gonorrhoeae
cgggtacgaattcgactgct

SEQ ID NO: 53432 - DNA, 20 bp, Neisseria gonorrhoeae
gggtacgaattcgactgctt

SEQ ID NO: 53433 - DNA, 20 bp, Neisseria gonorrhoeae
tcggtttccgccgccaaacc

SEQ ID NO: 53434 - DNA, 20 bp, Neisseria gonorrhoeae
ccgccgccaaaccggtttcc

SEQ ID NO: 53435 - DNA, 20 bp, Neisseria gonorrhoeae
cgccgccaaaccggtttcca

SEQ ID NO: 53436 - DNA, 20 bp, Neisseria gonorrhoeae
ccaacagttttgccacaccg

SEQ ID NO: 53437 - DNA, 20 bp, Neisseria gonorrhoeae
caacagttttgccacaccgt

SEQ ID NO: 53438 - DNA, 20 bp, Neisseria gonorrhoeae
gaaaggcagtcaatacgatg

SEQ ID NO: 53439 - DNA, 20 bp, Neisseria gonorrhoeae
aaaggcagtcaatacgatgc

SEQ ID NO: 53440 - DNA, 20 bp, Neisseria gonorrhoeae
gctgaaccaaaatttaacta

SEQ ID NO: 53441 - DNA, 20 bp, Neisseria gonorrhoeae
ctgaaccaaaatttaactat

SEQ ID NO: 53442 - DNA, 20 bp, Neisseria gonorrhoeae
aactatgctgtctaaattta

SEQ ID NO: 53443 - DNA, 20 bp, Neisseria gonorrhoeae
aagacacgcacgaattggat

SEQ ID NO: 53444 - DNA, 20 bp, Neisseria gonorrhoeae
gatttgcccaagcacccaaa

SEQ ID NO: 53445 - DNA, 20 bp, Neisseria gonorrhoeae
gcccaagcacccaaatcatg

SEQ ID NO: 53446 - DNA, 20 bp, Neisseria gonorrhoeae
cccaagcacccaaatcatgt

SEQ ID NO: 53447 - DNA, 20 bp, Neisseria gonorrhoeae
tttataaaacaggtggacat

SEQ ID NO: 53448 - DNA, 20 bp, Neisseria gonorrhoeae
tctatccgcgctcaataccg

SEQ ID NO: 53449 - DNA, 20 bp, Neisseria gonorrhoeae
gacttcggttcacgccaatg

SEQ ID NO: 53450 - DNA, 20 bp, Neisseria gonorrhoeae
acttcggttcacgccaatga

SEQ ID NO: 53451 - DNA, 20 bp, Neisseria gonorrhoeae
ggttcacgccaatgacgcgc

SEQ ID NO: 53452 - DNA, 20 bp, Neisseria gonorrhoeae
acgccaatgacgcgcaatcg

SEQ ID NO: 53453 - DNA, 20 bp, Neisseria gonorrhoeae
tttgaccgaacacgcatgac

SEQ ID NO: 53454 - DNA, 20 bp, Neisseria gonorrhoeae
ttgaccgaacacgcatgact

SEQ ID NO: 53455 - DNA, 20 bp, Neisseria gonorrhoeae
tgaccgaacacgcatgactg

SEQ ID NO: 53456 - DNA, 20 bp, Neisseria gonorrhoeae
gaccgaacacgcatgactga

SEQ ID NO: 53457 - DNA, 20 bp, Neisseria gonorrhoeae
accgaacacgcatgactgaa

SEQ ID NO: 53458 - DNA, 20 bp, Neisseria gonorrhoeae
gttattttgctgacggcaca

SEQ ID NO: 53459 - DNA, 20 bp, Neisseria gonorrhoeae
ttttgctgacggcacaccgt

SEQ ID NO: 53460 - DNA, 20 bp, Neisseria gonorrhoeae
tgctgacggcacaccgtctg

SEQ ID NO: 53461 - DNA, 20 bp, Neisseria gonorrhoeae
gctgacggcacaccgtctgc

SEQ ID NO: 53462 - DNA, 20 bp, Neisseria gonorrhoeae
ctgacggcacaccgtctgcc

SEQ ID NO: 53463 - DNA, 20 bp, Neisseria gonorrhoeae
aattaaaggttttcacaaaa

SEQ ID NO: 53464 - DNA, 20 bp, Neisseria gonorrhoeae
attaaaggttttcacaaaaa

SEQ ID NO: 53465 - DNA, 20 bp, Neisseria gonorrhoeae
aaggttttcacaaaaaagac

SEQ ID NO: 53466 - DNA, 20 bp, Neisseria gonorrhoeae
tcacaaaaaagacggtggca

SEQ ID NO: 53467 - DNA, 20 bp, Neisseria gonorrhoeae
cacaaaaaagacggtggcac

SEQ ID NO: 53468 - DNA, 20 bp, Neisseria gonorrhoeae
gtctgaaaatgaccaaaagc

SEQ ID NO: 53469 - DNA, 20 bp, Neisseria gonorrhoeae
tctgaaaatgaccaaaagcc

SEQ ID NO: 53470 - DNA, 20 bp, Neisseria gonorrhoeae
tcagcagagtaggtggtttg

SEQ ID NO: 53471 - DNA, 20 bp, Neisseria gonorrhoeae
gcccgagtgttgttgtttgc

SEQ ID NO: 53472 - DNA, 20 bp, Neisseria gonorrhoeae
cccgagtgttgttgtttgct

SEQ ID NO: 53473 - DNA, 20 bp, Neisseria gonorrhoeae
tgtttcacgcaatggcgaaa

SEQ ID NO: 53474 - DNA, 20 bp, Neisseria gonorrhoeae
cacgcaatggcgaaattgca

SEQ ID NO: 53475 - DNA, 20 bp, Neisseria gonorrhoeae
acgcaatggcgaaattgcac

SEQ ID NO: 53476 - DNA, 20 bp, Neisseria gonorrhoeae
cactggaaaaccaagacggc

SEQ ID NO: 53477 - DNA, 20 bp, Neisseria gonorrhoeae
ttcatggtaaacgagcggta

SEQ ID NO: 53478 - DNA, 20 bp, Neisseria gonorrhoeae
ttcaaccgctgcctttgccg

SEQ ID NO: 53479 - DNA, 20 bp, Neisseria gonorrhoeae
tcaaccgctgcctttgccgg

SEQ ID NO: 53480 - DNA, 20 bp, Neisseria gonorrhoeae
caaccgctgcctttgccggg

SEQ ID NO: 53481 - DNA, 20 bp, Neisseria gonorrhoeae
aaccgctgcctttgccgggg

SEQ ID NO: 53482 - DNA, 20 bp, Neisseria gonorrhoeae
gccgggggcgcattcacgct

SEQ ID NO: 53483 - DNA, 20 bp, Neisseria gonorrhoeae
cgagcggaccaccgacggta

SEQ ID NO: 53484 - DNA, 20 bp, Neisseria gonorrhoeae
gaagcgcgcgctgaaacggg

SEQ ID NO: 53485 - DNA, 20 bp, Neisseria gonorrhoeae
aagcgcgcgctgaaacggga

SEQ ID NO: 53486 - DNA, 20 bp, Neisseria gonorrhoeae
cagcgcgcgcttcaaagagc

SEQ ID NO: 53487 - DNA, 20 bp, Neisseria gonorrhoeae
agcgcgcgcttcaaagagct

SEQ ID NO: 53488 - DNA, 20 bp, Neisseria gonorrhoeae
ccgttcaaataaatcgctct

SEQ ID NO: 53489 - DNA, 20 bp, Neisseria gonorrhoeae
aaataaatcgctctacataa

SEQ ID NO: 53490 - DNA, 20 bp, Neisseria gonorrhoeae
gagataacgcattgattttt

SEQ ID NO: 53491 - DNA, 20 bp, Neisseria gonorrhoeae
agataacgcattgattttta

SEQ ID NO: 53492 - DNA, 20 bp, Neisseria gonorrhoeae
atttttatgtagagcgattt

SEQ ID NO: 53493 - DNA, 20 bp, Neisseria gonorrhoeae
tagtcggctttgatttgcgg

SEQ ID NO: 53494 - DNA, 20 bp, Neisseria gonorrhoeae
gatttgcggaatgctctcgg

SEQ ID NO: 53495 - DNA, 20 bp, Neisseria gonorrhoeae
atttgcggaatgctctcggg

SEQ ID NO: 53496 - DNA, 20 bp, Neisseria gonorrhoeae
gcggaatgctctcgggctgg

SEQ ID NO: 53497 - DNA, 20 bp, Neisseria gonorrhoeae
cggaatgctctcgggctggt

SEQ ID NO: 53498 - DNA, 20 bp, Neisseria gonorrhoeae
ccgtcaacgactacctcgcc

SEQ ID NO: 53499 - DNA, 20 bp, Neisseria gonorrhoeae
acggtaacgacgtgcacgcc

SEQ ID NO: 53500 - DNA, 20 bp, Neisseria gonorrhoeae
gccggccagcgcgttgagat

SEQ ID NO: 53501 - DNA, 20 bp, Neisseria gonorrhoeae
ccggccagcgcgttgagata

SEQ ID NO: 53502 - DNA, 20 bp, Neisseria gonorrhoeae
agatagacggcgagggtggc

SEQ ID NO: 53503 - DNA, 20 bp, Neisseria gonorrhoeae
ccctgcgcggtcaaacagtt

SEQ ID NO: 53504 - DNA, 20 bp, Neisseria gonorrhoeae
tccgcccacgcctgcgcgtt

SEQ ID NO: 53505 - DNA, 20 bp, Neisseria gonorrhoeae
tgaatcaaagcacattgacg

SEQ ID NO: 53506 - DNA, 20 bp, Neisseria gonorrhoeae
tgcccgcgtcaatgtgcttt

SEQ ID NO: 53507 - DNA, 20 bp, Neisseria gonorrhoeae
gattcacaacgcgcaggcgt

SEQ ID NO: 53508 - DNA, 20 bp, Neisseria gonorrhoeae
cttgaaggcttcaaaggttt

SEQ ID NO: 53509 - DNA, 20 bp, Neisseria gonorrhoeae
aaggcttcaaaggttttttc

SEQ ID NO: 53510 - DNA, 20 bp, Neisseria gonorrhoeae
aaaggttttttcagacggcg

SEQ ID NO: 53511 - DNA, 20 bp, Neisseria gonorrhoeae
tttcagacggcgtaaacggt

SEQ ID NO: 53512 - DNA, 20 bp, Neisseria gonorrhoeae
ttcagacggcgtaaacggtt

SEQ ID NO: 53513 - DNA, 20 bp, Neisseria gonorrhoeae
ttttgcgcgccatccgcatc

SEQ ID NO: 53514 - DNA, 20 bp, Neisseria gonorrhoeae
tttgcgcgccatccgcatct

SEQ ID NO: 53515 - DNA, 20 bp, Neisseria gonorrhoeae
ttgcgcgccatccgcatctg

SEQ ID NO: 53516 - DNA, 20 bp, Neisseria gonorrhoeae
tgcgcgccatccgcatctgt

SEQ ID NO: 53517 - DNA, 20 bp, Neisseria gonorrhoeae
gcgcgccatccgcatctgtt

SEQ ID NO: 53518 - DNA, 20 bp, Neisseria gonorrhoeae
agcagcaggcgcaggaattg

SEQ ID NO: 53519 - DNA, 20 bp, Neisseria gonorrhoeae
ggcatcagccttgccacgct

SEQ ID NO: 53520 - DNA, 20 bp, Neisseria gonorrhoeae
ccacgctataccgcaagctg

SEQ ID NO: 53521 - DNA, 20 bp, Neisseria gonorrhoeae
acgctgaccgcctccagctt

SEQ ID NO: 53522 - DNA, 20 bp, Neisseria gonorrhoeae
cggtatagcgtggcaaggct

SEQ ID NO: 53523 - DNA, 20 bp, Neisseria gonorrhoeae
aaaccccgcgtcgaggcaga

SEQ ID NO: 53524 - DNA, 20 bp, Neisseria gonorrhoeae
cgggtagtgtttgaggatga

SEQ ID NO: 53525 - DNA, 20 bp, Neisseria gonorrhoeae
gaggatgaccgacactgcct

SEQ ID NO: 53526 - DNA, 20 bp, Neisseria gonorrhoeae
aggatgaccgacactgcctg

SEQ ID NO: 53527 - DNA, 20 bp, Neisseria gonorrhoeae
ccagtcgccgccgtctgcct

SEQ ID NO: 53528 - DNA, 20 bp, Neisseria gonorrhoeae
gtgggttttgaagcgggtgt

SEQ ID NO: 53529 - DNA, 20 bp, Neisseria gonorrhoeae
tgaagcgggtgttttccagg

SEQ ID NO: 53530 - DNA, 20 bp, Neisseria gonorrhoeae
gaagcgggtgttttccaggc

SEQ ID NO: 53531 - DNA, 20 bp, Neisseria gonorrhoeae
aagcgggtgttttccaggcg

SEQ ID NO: 53532 - DNA, 20 bp, Neisseria gonorrhoeae
tccaggcgtccccagttgtg

SEQ ID NO: 53533 - DNA, 20 bp, Neisseria gonorrhoeae
cgtccgcaagggtttgcgtg

SEQ ID NO: 53534 - DNA, 20 bp, Neisseria gonorrhoeae
gcgtgtcggcgcggtcaaaa

SEQ ID NO: 53535 - DNA, 20 bp, Neisseria gonorrhoeae
cgtgtcggcgcggtcaaaac

SEQ ID NO: 53536 - DNA, 20 bp, Neisseria gonorrhoeae
gacggcggcttggggctgcg

SEQ ID NO: 53537 - DNA, 20 bp, Neisseria gonorrhoeae
gggctgcgggcaaacctgcg

SEQ ID NO: 53538 - DNA, 20 bp, Neisseria gonorrhoeae
gattcagcttcggatggaaa

SEQ ID NO: 53539 - DNA, 20 bp, Neisseria gonorrhoeae
attcagcttcggatggaaaa

SEQ ID NO: 53540 - DNA, 20 bp, Neisseria gonorrhoeae
agcttcggatggaaaaggcg

SEQ ID NO: 53541 - DNA, 20 bp, Neisseria gonorrhoeae
ggatggaaaaggcgcacgtt

SEQ ID NO: 53542 - DNA, 20 bp, Neisseria gonorrhoeae
ttctttttcaacgtgcgcct

SEQ ID NO: 53543 - DNA, 20 bp, Neisseria gonorrhoeae
gcacgggcggcacatacggc

SEQ ID NO: 53544 - DNA, 20 bp, Neisseria gonorrhoeae
cacgggcggcacatacggcg

SEQ ID NO: 53545 - DNA, 20 bp, Neisseria gonorrhoeae
gcggcaggagcggcattgta

SEQ ID NO: 53546 - DNA, 20 bp, Neisseria gonorrhoeae
tacggcgttgcgccataagg

SEQ ID NO: 53547 - DNA, 20 bp, Neisseria gonorrhoeae
tggcgcaacgccgtacaatg

SEQ ID NO: 53548 - DNA, 20 bp, Neisseria gonorrhoeae
ccagcagttgggacagcagg

SEQ ID NO: 53549 - DNA, 20 bp, Neisseria gonorrhoeae
cagcagttgggacagcaggt

SEQ ID NO: 53550 - DNA, 20 bp, Neisseria gonorrhoeae
ggacagcaggtcttttttgt

SEQ ID NO: 53551 - DNA, 20 bp, Neisseria gonorrhoeae
tttgttgatgtagcccaacg

SEQ ID NO: 53552 - DNA, 20 bp, Neisseria gonorrhoeae
ttgttgatgtagcccaacgg

SEQ ID NO: 53553 - DNA, 20 bp, Neisseria gonorrhoeae
attttgctgatgttggcggt

SEQ ID NO: 53554 - DNA, 20 bp, Neisseria gonorrhoeae
ttttgctgatgttggcggta

SEQ ID NO: 53555 - DNA, 20 bp, Neisseria gonorrhoeae
tgctgatgttggcggtaatt

SEQ ID NO: 53556 - DNA, 20 bp, Neisseria gonorrhoeae
gctgatgttggcggtaattt

SEQ ID NO: 53557 - DNA, 20 bp, Neisseria gonorrhoeae
ctgatgttggcggtaattta

SEQ ID NO: 53558 - DNA, 20 bp, Neisseria gonorrhoeae
ggctgggggctgctggatgc

SEQ ID NO: 53559 - DNA, 20 bp, Neisseria gonorrhoeae
atggccttacccgcatccag

SEQ ID NO: 53560 - DNA, 20 bp, Neisseria gonorrhoeae
cccgcatccagcagccccca

SEQ ID NO: 53561 - DNA, 20 bp, Neisseria gonorrhoeae
ctgtccactccgactgcacc

SEQ ID NO: 53562 - DNA, 20 bp, Neisseria gonorrhoeae
ggcagcggcacattccgcgc

SEQ ID NO: 53563 - DNA, 20 bp, Neisseria gonorrhoeae
cgcgcccgccggtctgaaac

SEQ ID NO: 53564 - DNA, 20 bp, Neisseria gonorrhoeae
tccagattgctgccgccctg

SEQ ID NO: 53565 - DNA, 20 bp, Neisseria gonorrhoeae
ccagattgctgccgccctgt

SEQ ID NO: 53566 - DNA, 20 bp, Neisseria gonorrhoeae
cagattgctgccgccctgtt

SEQ ID NO: 53567 - DNA, 20 bp, Neisseria gonorrhoeae
tgccttcgacaccgccctgt

SEQ ID NO: 53568 - DNA, 20 bp, Neisseria gonorrhoeae
gccttcgacaccgccctgtt

SEQ ID NO: 53569 - DNA, 20 bp, Neisseria gonorrhoeae
ccttcgacaccgccctgttc

SEQ ID NO: 53570 - DNA, 20 bp, Neisseria gonorrhoeae
gacaccgccctgttcccacg

SEQ ID NO: 53571 - DNA, 20 bp, Neisseria gonorrhoeae
ccacgttccaccgtcctgtt

SEQ ID NO: 53572 - DNA, 20 bp, Neisseria gonorrhoeae
atcctcctcacgaaaatacg

SEQ ID NO: 53573 - DNA, 20 bp, Neisseria gonorrhoeae
tcctcctcacgaaaatacgc

SEQ ID NO: 53574 - DNA, 20 bp, Neisseria gonorrhoeae
ctttcttgatgggcgtcttg

SEQ ID NO: 53575 - DNA, 20 bp, Neisseria gonorrhoeae
cttgatgggcgtcttgcgta

SEQ ID NO: 53576 - DNA, 20 bp, Neisseria gonorrhoeae
ttgatgggcgtcttgcgtat

SEQ ID NO: 53577 - DNA, 20 bp, Neisseria gonorrhoeae
aaaacccacgaagcctcatt

SEQ ID NO: 53578 - DNA, 20 bp, Neisseria gonorrhoeae
ggcgtgcgctaccgcttctg

SEQ ID NO: 53579 - DNA, 20 bp, Neisseria gonorrhoeae
tgattccccgataccgatgc

SEQ ID NO: 53580 - DNA, 20 bp, Neisseria gonorrhoeae
cccgataccgatgccgtctg

SEQ ID NO: 53581 - DNA, 20 bp, Neisseria gonorrhoeae
agacggcatcggtatcgggg

SEQ ID NO: 53582 - DNA, 20 bp, Neisseria gonorrhoeae
ccgcgcaggcggaaatccgg

SEQ ID NO: 53583 - DNA, 20 bp, Neisseria gonorrhoeae
cagtcatttccgatagattc

SEQ ID NO: 53584 - DNA, 20 bp, Neisseria gonorrhoeae
agtcatttccgatagattcc

SEQ ID NO: 53585 - DNA, 20 bp, Neisseria gonorrhoeae
ccgatagattcccgccgcgt

SEQ ID NO: 53586 - DNA, 20 bp, Neisseria gonorrhoeae
cgatagattcccgccgcgtc

SEQ ID NO: 53587 - DNA, 20 bp, Neisseria gonorrhoeae
tggctcgacgaaaaccgtcc

SEQ ID NO: 53588 - DNA, 20 bp, Neisseria gonorrhoeae
ccgaattggataccaacggc

SEQ ID NO: 53589 - DNA, 20 bp, Neisseria gonorrhoeae
gtatccaattcggcaaggta

SEQ ID NO: 53590 - DNA, 20 bp, Neisseria gonorrhoeae
ggcaaggtaggctttgactt

SEQ ID NO: 53591 - DNA, 20 bp, Neisseria gonorrhoeae
gactttggcgagcagactct

SEQ ID NO: 53592 - DNA, 20 bp, Neisseria gonorrhoeae
ggactcattgggcgaattcc

SEQ ID NO: 53593 - DNA, 20 bp, Neisseria gonorrhoeae
ggcgaattcctcgcgcttgc

SEQ ID NO: 53594 - DNA, 20 bp, Neisseria gonorrhoeae
ctcgcgcttgccgtatcgtt

SEQ ID NO: 53595 - DNA, 20 bp, Neisseria gonorrhoeae
ccgtatcgtttgaacatctg

SEQ ID NO: 53596 - DNA, 20 bp, Neisseria gonorrhoeae
gaacatctggcgcaaaaaac

SEQ ID NO: 53597 - DNA, 20 bp, Neisseria gonorrhoeae
acactgcacacgggcttgac

SEQ ID NO: 53598 - DNA, 20 bp, Neisseria gonorrhoeae
acaggcgaagtgttggacgc

SEQ ID NO: 53599 - DNA, 20 bp, Neisseria gonorrhoeae
gacgcaccgcccaaagccga

SEQ ID NO: 53600 - DNA, 20 bp, Neisseria gonorrhoeae
cggctcggctttgggcggtg

SEQ ID NO: 53601 - DNA, 20 bp, Neisseria gonorrhoeae
ggctcggctttgggcggtgc

SEQ ID NO: 53602 - DNA, 20 bp, Neisseria gonorrhoeae
gagttccgaagcgcccgcct

SEQ ID NO: 53603 - DNA, 20 bp, Neisseria gonorrhoeae
cgaagcgcccgccttttcca

SEQ ID NO: 53604 - DNA, 20 bp, Neisseria gonorrhoeae
tccaaagcctccgtatcatc

SEQ ID NO: 53605 - DNA, 20 bp, Neisseria gonorrhoeae
ccaaagcctccgtatcatcc

SEQ ID NO: 53606 - DNA, 20 bp, Neisseria gonorrhoeae
caaagcctccgtatcatccg

SEQ ID NO: 53607 - DNA, 20 bp, Neisseria gonorrhoeae
cgccgtagtcggtaatttcc

SEQ ID NO: 53608 - DNA, 20 bp, Neisseria gonorrhoeae
ccttcgcacccccgccgaca

SEQ ID NO: 53609 - DNA, 20 bp, Neisseria gonorrhoeae
cttcgcacccccgccgacat

SEQ ID NO: 53610 - DNA, 20 bp, Neisseria gonorrhoeae
gcacccccgccgacatccac

SEQ ID NO: 53611 - DNA, 20 bp, Neisseria gonorrhoeae
tcgccacaccgcgtatcgta

SEQ ID NO: 53612 - DNA, 20 bp, Neisseria gonorrhoeae
gtcatcgtgccgccgccgtc

SEQ ID NO: 53613 - DNA, 20 bp, Neisseria gonorrhoeae
acacgcaaacccgcctccga

SEQ ID NO: 53614 - DNA, 20 bp, Neisseria gonorrhoeae
gcgtgtgaatcaggcgcgtt

SEQ ID NO: 53615 - DNA, 20 bp, Neisseria gonorrhoeae
cgtgtgaatcaggcgcgttt

SEQ ID NO: 53616 - DNA, 20 bp, Neisseria gonorrhoeae
ccccgttgacggcggcggca

SEQ ID NO: 53617 - DNA, 20 bp, Neisseria gonorrhoeae
gccaacacctcgcccgcctt

SEQ ID NO: 53618 - DNA, 20 bp, Neisseria gonorrhoeae
tccccgaaagtgtccgccaa

SEQ ID NO: 53619 - DNA, 20 bp, Neisseria gonorrhoeae
cgcaacgccgcttccgcatc

SEQ ID NO: 53620 - DNA, 20 bp, Neisseria gonorrhoeae
cgcaatatgttggcggacac

SEQ ID NO: 53621 - DNA, 20 bp, Neisseria gonorrhoeae
gcggacactttcggggataa

SEQ ID NO: 53622 - DNA, 20 bp, Neisseria gonorrhoeae
ttcgcctgttcgaaagccgc

SEQ ID NO: 53623 - DNA, 20 bp, Neisseria gonorrhoeae
tcgcctgttcgaaagccgcg

SEQ ID NO: 53624 - DNA, 20 bp, Neisseria gonorrhoeae
cgcctgttcgaaagccgcgt

SEQ ID NO: 53625 - DNA, 20 bp, Neisseria gonorrhoeae
gcctgttcgaaagccgcgtc

SEQ ID NO: 53626 - DNA, 20 bp, Neisseria gonorrhoeae
gaaagccgcgtcgctgtccg

SEQ ID NO: 53627 - DNA, 20 bp, Neisseria gonorrhoeae
gccgccatcaccggataagc

SEQ ID NO: 53628 - DNA, 20 bp, Neisseria gonorrhoeae
ccgtctgcgacaggttcaca

SEQ ID NO: 53629 - DNA, 20 bp, Neisseria gonorrhoeae
acaaccgcagaagcgggcga

SEQ ID NO: 53630 - DNA, 20 bp, Neisseria gonorrhoeae
tgcggttgtgaacctgtcgc

SEQ ID NO: 53631 - DNA, 20 bp, Neisseria gonorrhoeae
tgaacctgtcgcagacggca

SEQ ID NO: 53632 - DNA, 20 bp, Neisseria gonorrhoeae
ggatataatcccgggacttc

SEQ ID NO: 53633 - DNA, 20 bp, Neisseria gonorrhoeae
atcacgggcgaaaccttaaa

SEQ ID NO: 53634 - DNA, 20 bp, Neisseria gonorrhoeae
aaccccggcccgaaatcagc

SEQ ID NO: 53635 - DNA, 20 bp, Neisseria gonorrhoeae
cgggccggggtttaaggttt

SEQ ID NO: 53636 - DNA, 20 bp, Neisseria gonorrhoeae
gggccggggtttaaggtttc

SEQ ID NO: 53637 - DNA, 20 bp, Neisseria gonorrhoeae
tcaaaacgctccttcaggcg

SEQ ID NO: 53638 - DNA, 20 bp, Neisseria gonorrhoeae
aggcggcgcaccgtttccgc

SEQ ID NO: 53639 - DNA, 20 bp, Neisseria gonorrhoeae
tgacaacgagctgggcggtg

SEQ ID NO: 53640 - DNA, 20 bp, Neisseria gonorrhoeae
gacaacgagctgggcggtgt

SEQ ID NO: 53641 - DNA, 20 bp, Neisseria gonorrhoeae
acaacgagctgggcggtgtg

SEQ ID NO: 53642 - DNA, 20 bp, Neisseria gonorrhoeae
cctgacaaccttgtccgcct

SEQ ID NO: 53643 - DNA, 20 bp, Neisseria gonorrhoeae
tccgcctccgtaaccgcctt

SEQ ID NO: 53644 - DNA, 20 bp, Neisseria gonorrhoeae
ttcgcatccgcgccgaagag

SEQ ID NO: 53645 - DNA, 20 bp, Neisseria gonorrhoeae
gcatccgcgccgaagagttc

SEQ ID NO: 53646 - DNA, 20 bp, Neisseria gonorrhoeae
cgacaaacgcccgtattcct

SEQ ID NO: 53647 - DNA, 20 bp, Neisseria gonorrhoeae
cccgtcctgccgtcaaacca

SEQ ID NO: 53648 - DNA, 20 bp, Neisseria gonorrhoeae
tccggcgccgtttcggacac

SEQ ID NO: 53649 - DNA, 20 bp, Neisseria gonorrhoeae
cggacacggcggcgacatcc

SEQ ID NO: 53650 - DNA, 20 bp, Neisseria gonorrhoeae
ggacacggcggcgacatcca

SEQ ID NO: 53651 - DNA, 20 bp, Neisseria gonorrhoeae
tcgcagcgtgtggagggctg

SEQ ID NO: 53652 - DNA, 20 bp, Neisseria gonorrhoeae
cttaggcgataccctgcccg

SEQ ID NO: 53653 - DNA, 20 bp, Neisseria gonorrhoeae
ttaggcgataccctgcccgc

SEQ ID NO: 53654 - DNA, 20 bp, Neisseria gonorrhoeae
ggcgataccctgcccgccga

SEQ ID NO: 53655 - DNA, 20 bp, Neisseria gonorrhoeae
cgcaacctgcggattcaata

SEQ ID NO: 53656 - DNA, 20 bp, Neisseria gonorrhoeae
aataccggcaacaccgtatc

SEQ ID NO: 53657 - DNA, 20 bp, Neisseria gonorrhoeae
cggatgttgcgcacggtaag

SEQ ID NO: 53658 - DNA, 20 bp, Neisseria gonorrhoeae
cgcacggtaagcgcgtacag

SEQ ID NO: 53659 - DNA, 20 bp, Neisseria gonorrhoeae
cgccaaaccctcaggataat

SEQ ID NO: 53660 - DNA, 20 bp, Neisseria gonorrhoeae
tcctgagggtttggcggaat

SEQ ID NO: 53661 - DNA, 20 bp, Neisseria gonorrhoeae
ggcggaatcggccggggctg

SEQ ID NO: 53662 - DNA, 20 bp, Neisseria gonorrhoeae
tcgtcccattccccgtttgc

SEQ ID NO: 53663 - DNA, 20 bp, Neisseria gonorrhoeae
cccgtttgccagccccgtac

SEQ ID NO: 53664 - DNA, 20 bp, Neisseria gonorrhoeae
gccagccccgtacccaaata

SEQ ID NO: 53665 - DNA, 20 bp, Neisseria gonorrhoeae
ccagccccgtacccaaatac

SEQ ID NO: 53666 - DNA, 20 bp, Neisseria gonorrhoeae
gcgggcgagtatttgggtac

SEQ ID NO: 53667 - DNA, 20 bp, Neisseria gonorrhoeae
gtgctgggcacgtcttccaa

SEQ ID NO: 53668 - DNA, 20 bp, Neisseria gonorrhoeae
caaagccactttcagccgta

SEQ ID NO: 53669 - DNA, 20 bp, Neisseria gonorrhoeae
cagccgtatgttttgcaggt

SEQ ID NO: 53670 - DNA, 20 bp, Neisseria gonorrhoeae
agccgtatgttttgcaggtc

SEQ ID NO: 53671 - DNA, 20 bp, Neisseria gonorrhoeae
ggaagacgtgcccagcacca

SEQ ID NO: 53672 - DNA, 20 bp, Neisseria gonorrhoeae
ttttgtcgcgcaggcagtct

SEQ ID NO: 53673 - DNA, 20 bp, Neisseria gonorrhoeae
tttgtcgcgcaggcagtctg

SEQ ID NO: 53674 - DNA, 20 bp, Neisseria gonorrhoeae
ttgtcgcgcaggcagtctgc

SEQ ID NO: 53675 - DNA, 20 bp, Neisseria gonorrhoeae
tgtcgcgcaggcagtctgcc

SEQ ID NO: 53676 - DNA, 20 bp, Neisseria gonorrhoeae
gtcgcgcaggcagtctgccg

SEQ ID NO: 53677 - DNA, 20 bp, Neisseria gonorrhoeae
tcattgcacacgcccgcgat

SEQ ID NO: 53678 - DNA, 20 bp, Neisseria gonorrhoeae
cacacgcccgcgatgttcgg

SEQ ID NO: 53679 - DNA, 20 bp, Neisseria gonorrhoeae
ggcgtgcattgcccgccttt

SEQ ID NO: 53680 - DNA, 20 bp, Neisseria gonorrhoeae
cccgcctttggcggctttgc

SEQ ID NO: 53681 - DNA, 20 bp, Neisseria gonorrhoeae
ggcggctttgcgtatcgcgc

SEQ ID NO: 53682 - DNA, 20 bp, Neisseria gonorrhoeae
cgtccacaggccggcgccca

SEQ ID NO: 53683 - DNA, 20 bp, Neisseria gonorrhoeae
ccgccgtcatcgcgccggct

SEQ ID NO: 53684 - DNA, 20 bp, Neisseria gonorrhoeae
ggcgccggcctgtggacgca

SEQ ID NO: 53685 - DNA, 20 bp, Neisseria gonorrhoeae
ctgaaccgcggggcgatgcc

SEQ ID NO: 53686 - DNA, 20 bp, Neisseria gonorrhoeae
tgaaccgcggggcgatgccc

SEQ ID NO: 53687 - DNA, 20 bp, Neisseria gonorrhoeae
ttccagcgcgtcgcgcatcg

SEQ ID NO: 53688 - DNA, 20 bp, Neisseria gonorrhoeae
tccagcgcgtcgcgcatcgc

SEQ ID NO: 53689 - DNA, 20 bp, Neisseria gonorrhoeae
ccagcgcgtcgcgcatcgcc

SEQ ID NO: 53690 - DNA, 20 bp, Neisseria gonorrhoeae
gcgcgcggaagcccgccgcc

SEQ ID NO: 53691 - DNA, 20 bp, Neisseria gonorrhoeae
acaggccggatcctacacgc

SEQ ID NO: 53692 - DNA, 20 bp, Neisseria gonorrhoeae
caggccggatcctacacgcc

SEQ ID NO: 53693 - DNA, 20 bp, Neisseria gonorrhoeae
acgatgtgggcattcaggcg

SEQ ID NO: 53694 - DNA, 20 bp, Neisseria gonorrhoeae
cgatgtgggcattcaggcgg

SEQ ID NO: 53695 - DNA, 20 bp, Neisseria gonorrhoeae
ttgcggacaaaggcggcgcg

SEQ ID NO: 53696 - DNA, 20 bp, Neisseria gonorrhoeae
cggacaaaggcggcgcgttg

SEQ ID NO: 53697 - DNA, 20 bp, Neisseria gonorrhoeae
gtccgggccgtaaaagactc

SEQ ID NO: 53698 - DNA, 20 bp, Neisseria gonorrhoeae
cgacaacggcgccggcttca

SEQ ID NO: 53699 - DNA, 20 bp, Neisseria gonorrhoeae
tcgcaatgccggatgacgtc

SEQ ID NO: 53700 - DNA, 20 bp, Neisseria gonorrhoeae
tcgagaaaatgcgactgcgg

SEQ ID NO: 53701 - DNA, 20 bp, Neisseria gonorrhoeae
aagcggcaatgagggcggta

SEQ ID NO: 53702 - DNA, 20 bp, Neisseria gonorrhoeae
ccgcttcaagttgcggtccg

SEQ ID NO: 53703 - DNA, 20 bp, Neisseria gonorrhoeae
aagttgcggtccgcagtcgc

SEQ ID NO: 53704 - DNA, 20 bp, Neisseria gonorrhoeae
cggtccgcagtcgcattttc

SEQ ID NO: 53705 - DNA, 20 bp, Neisseria gonorrhoeae
tttgcggggttttcggcggg

SEQ ID NO: 53706 - DNA, 20 bp, Neisseria gonorrhoeae
gcggggttttcggcgggcga

SEQ ID NO: 53707 - DNA, 20 bp, Neisseria gonorrhoeae
cggggttttcggcgggcgat

SEQ ID NO: 53708 - DNA, 20 bp, Neisseria gonorrhoeae
tcggcgggcgatacttcggg

SEQ ID NO: 53709 - DNA, 20 bp, Neisseria gonorrhoeae
cggcgggcgatacttcgggc

SEQ ID NO: 53710 - DNA, 20 bp, Neisseria gonorrhoeae
ggtttttgcaatcgtattgc

SEQ ID NO: 53711 - DNA, 20 bp, Neisseria gonorrhoeae
gtttttgcaatcgtattgct

SEQ ID NO: 53712 - DNA, 20 bp, Neisseria gonorrhoeae
ttgcaatcgtattgctcagg

SEQ ID NO: 53713 - DNA, 20 bp, Neisseria gonorrhoeae
tgcaatcgtattgctcaggc

SEQ ID NO: 53714 - DNA, 20 bp, Neisseria gonorrhoeae
gcaatcgtattgctcaggct

SEQ ID NO: 53715 - DNA, 20 bp, Neisseria gonorrhoeae
caaaggctgcgagccgacgg

SEQ ID NO: 53716 - DNA, 20 bp, Neisseria gonorrhoeae
aaaggctgcgagccgacggg

SEQ ID NO: 53717 - DNA, 20 bp, Neisseria gonorrhoeae
tccaccaccaagagcgcgcc

SEQ ID NO: 53718 - DNA, 20 bp, Neisseria gonorrhoeae
gcggaattggcgcacggcat

SEQ ID NO: 53719 - DNA, 20 bp, Neisseria gonorrhoeae
gcgcacggcatcggcgcgct

SEQ ID NO: 53720 - DNA, 20 bp, Neisseria gonorrhoeae
tgttcgcggtatccggtttg

SEQ ID NO: 53721 - DNA, 20 bp, Neisseria gonorrhoeae
gcggtatccggtttgttctt

SEQ ID NO: 53722 - DNA, 20 bp, Neisseria gonorrhoeae
gttctttgccgccgcgtatg

SEQ ID NO: 53723 - DNA, 20 bp, Neisseria gonorrhoeae
ttctttgccgccgcgtatgg

SEQ ID NO: 53724 - DNA, 20 bp, Neisseria gonorrhoeae
tttgccgccgcgtatggcga

SEQ ID NO: 53725 - DNA, 20 bp, Neisseria gonorrhoeae
tggtcaacagccgtatgtgt

SEQ ID NO: 53726 - DNA, 20 bp, Neisseria gonorrhoeae
ggtcaacagccgtatgtgtg

SEQ ID NO: 53727 - DNA, 20 bp, Neisseria gonorrhoeae
gtcaacagccgtatgtgtgc

SEQ ID NO: 53728 - DNA, 20 bp, Neisseria gonorrhoeae
gcagatggggcggttgtttt

SEQ ID NO: 53729 - DNA, 20 bp, Neisseria gonorrhoeae
ttttcggcacacatacggct

SEQ ID NO: 53730 - DNA, 20 bp, Neisseria gonorrhoeae
ggaaggcaacaccctgcgcg

SEQ ID NO: 53731 - DNA, 20 bp, Neisseria gonorrhoeae
cgtcctcgccgatccggccg

SEQ ID NO: 53732 - DNA, 20 bp, Neisseria gonorrhoeae
tctttggtgttttggcgttt

SEQ ID NO: 53733 - DNA, 20 bp, Neisseria gonorrhoeae
ggtgttttggcgtttgccgg

SEQ ID NO: 53734 - DNA, 20 bp, Neisseria gonorrhoeae
gtgttttggcgtttgccggc

SEQ ID NO: 53735 - DNA, 20 bp, Neisseria gonorrhoeae
caggaaaaagccgcgtccgg

SEQ ID NO: 53736 - DNA, 20 bp, Neisseria gonorrhoeae
tccaccaccgaagccctgcg

SEQ ID NO: 53737 - DNA, 20 bp, Neisseria gonorrhoeae
gaaaaggtcaacgcgctggg

SEQ ID NO: 53738 - DNA, 20 bp, Neisseria gonorrhoeae
aaaaggtcaacgcgctgggc

SEQ ID NO: 53739 - DNA, 20 bp, Neisseria gonorrhoeae
cgcgccgatgcccagcgcgt

SEQ ID NO: 53740 - DNA, 20 bp, Neisseria gonorrhoeae
ccggcctgatagactgcccg

SEQ ID NO: 53741 - DNA, 20 bp, Neisseria gonorrhoeae
caggttttacgttttgcaga

SEQ ID NO: 53742 - DNA, 20 bp, Neisseria gonorrhoeae
tacgttttgcagacgaccgc

SEQ ID NO: 53743 - DNA, 20 bp, Neisseria gonorrhoeae
acgttttgcagacgaccgcg

SEQ ID NO: 53744 - DNA, 20 bp, Neisseria gonorrhoeae
cgttttgcagacgaccgcgt

SEQ ID NO: 53745 - DNA, 20 bp, Neisseria gonorrhoeae
gccgccgccgccgaaaacat

SEQ ID NO: 53746 - DNA, 20 bp, Neisseria gonorrhoeae
ccgccgccgccgaaaacatc

SEQ ID NO: 53747 - DNA, 20 bp, Neisseria gonorrhoeae
tcggcggcggcggcaaacag

SEQ ID NO: 53748 - DNA, 20 bp, Neisseria gonorrhoeae
cggcggcggcggcaaacagg

SEQ ID NO: 53749 - DNA, 20 bp, Neisseria gonorrhoeae
ggcggcggcggcaaacagga

SEQ ID NO: 53750 - DNA, 20 bp, Neisseria gonorrhoeae
taccgtaaaatccgcacggt

SEQ ID NO: 53751 - DNA, 20 bp, Neisseria gonorrhoeae
accgtaaaatccgcacggtt

SEQ ID NO: 53752 - DNA, 20 bp, Neisseria gonorrhoeae
ccgtaaaatccgcacggtta

SEQ ID NO: 53753 - DNA, 20 bp, Neisseria gonorrhoeae
ccaaccattgtttggccttg

SEQ ID NO: 53754 - DNA, 20 bp, Neisseria gonorrhoeae
tttggccttggctgccgatg

SEQ ID NO: 53755 - DNA, 20 bp, Neisseria gonorrhoeae
atgcgctacggcagccgcga

SEQ ID NO: 53756 - DNA, 20 bp, Neisseria gonorrhoeae
cgcttcgccgccgaaaagtt

SEQ ID NO: 53757 - DNA, 20 bp, Neisseria gonorrhoeae
gccgccgaaaagttcttttt

SEQ ID NO: 53758 - DNA, 20 bp, Neisseria gonorrhoeae
tttttcgcggctgccgtagc

SEQ ID NO: 53759 - DNA, 20 bp, Neisseria gonorrhoeae
ttcgcggctgccgtagcgca

SEQ ID NO: 53760 - DNA, 20 bp, Neisseria gonorrhoeae
gatgatgaaacaatacggct

SEQ ID NO: 53761 - DNA, 20 bp, Neisseria gonorrhoeae
tgcctattgccggtatggtt

SEQ ID NO: 53762 - DNA, 20 bp, Neisseria gonorrhoeae
ccggtatggtttcaagacgc

SEQ ID NO: 53763 - DNA, 20 bp, Neisseria gonorrhoeae
caagacgcttcacgccttcc

SEQ ID NO: 53764 - DNA, 20 bp, Neisseria gonorrhoeae
aagacgcttcacgccttcct

SEQ ID NO: 53765 - DNA, 20 bp, Neisseria gonorrhoeae
caaccggtacaccagaggtt

SEQ ID NO: 53766 - DNA, 20 bp, Neisseria gonorrhoeae
gtccactccggtcctctcgt

SEQ ID NO: 53767 - DNA, 20 bp, Neisseria gonorrhoeae
caacgcccactgcagatagg

SEQ ID NO: 53768 - DNA, 20 bp, Neisseria gonorrhoeae
gaagtttgacgggggctgct

SEQ ID NO: 53769 - DNA, 20 bp, Neisseria gonorrhoeae
gacgggggctgctcctagta

SEQ ID NO: 53770 - DNA, 20 bp, Neisseria gonorrhoeae
acgccgcccgccgaaatagc

SEQ ID NO: 53771 - DNA, 20 bp, Neisseria gonorrhoeae
cgccgcccgccgaaatagct

SEQ ID NO: 53772 - DNA, 20 bp, Neisseria gonorrhoeae
cgcccggcccggcggggccc

SEQ ID NO: 53773 - DNA, 20 bp, Neisseria gonorrhoeae
ggccttggctgccgatgagg

SEQ ID NO: 53774 - DNA, 20 bp, Neisseria gonorrhoeae
gccttggctgccgatgaggt

SEQ ID NO: 53775 - DNA, 20 bp, Neisseria gonorrhoeae
gcccgtgcggatacggattg

SEQ ID NO: 53776 - DNA, 20 bp, Neisseria gonorrhoeae
cctcctcgaccggcagcaca

SEQ ID NO: 53777 - DNA, 20 bp, Neisseria gonorrhoeae
ccgtcgccgattttgcccga

SEQ ID NO: 53778 - DNA, 20 bp, Neisseria gonorrhoeae
tgcccgaacgcgccacctcg

SEQ ID NO: 53779 - DNA, 20 bp, Neisseria gonorrhoeae
gcccgaacgcgccacctcga

SEQ ID NO: 53780 - DNA, 20 bp, Neisseria gonorrhoeae
gcgggcgcggcaacaggcgc

SEQ ID NO: 53781 - DNA, 20 bp, Neisseria gonorrhoeae
cgggcgcggcaacaggcgcg

SEQ ID NO: 53782 - DNA, 20 bp, Neisseria gonorrhoeae
gcgtccgaaagcgggcttga

SEQ ID NO: 53783 - DNA, 20 bp, Neisseria gonorrhoeae
cggacgcgaacctttgcccg

SEQ ID NO: 53784 - DNA, 20 bp, Neisseria gonorrhoeae
ggacgcgaacctttgcccgt

SEQ ID NO: 53785 - DNA, 20 bp, Neisseria gonorrhoeae
tctccatccacgacgtgggc

SEQ ID NO: 53786 - DNA, 20 bp, Neisseria gonorrhoeae
gacaagccgcccgcgcccac

SEQ ID NO: 53787 - DNA, 20 bp, Neisseria gonorrhoeae
tggtcgccgagctgccagca

SEQ ID NO: 53788 - DNA, 20 bp, Neisseria gonorrhoeae
ggtcgccgagctgccagcag

SEQ ID NO: 53789 - DNA, 20 bp, Neisseria gonorrhoeae
gtcgccgagctgccagcagc

SEQ ID NO: 53790 - DNA, 20 bp, Neisseria gonorrhoeae
ggtatttgccgaccatttgg

SEQ ID NO: 53791 - DNA, 20 bp, Neisseria gonorrhoeae
gtatttgccgaccatttggt

SEQ ID NO: 53792 - DNA, 20 bp, Neisseria gonorrhoeae
gccgaccatttggtcgcggt

SEQ ID NO: 53793 - DNA, 20 bp, Neisseria gonorrhoeae
ccgaccatttggtcgcggtg

SEQ ID NO: 53794 - DNA, 20 bp, Neisseria gonorrhoeae
ggtcgcggtgggtcatgccg

SEQ ID NO: 53795 - DNA, 20 bp, Neisseria gonorrhoeae
acccgcgccggattcgatgc

SEQ ID NO: 53796 - DNA, 20 bp, Neisseria gonorrhoeae
cgatttgcccgtttacgccc

SEQ ID NO: 53797 - DNA, 20 bp, Neisseria gonorrhoeae
gatttgcccgtttacgccct

SEQ ID NO: 53798 - DNA, 20 bp, Neisseria gonorrhoeae
gcccgtttacgccctgttcg

SEQ ID NO: 53799 - DNA, 20 bp, Neisseria gonorrhoeae
cccgtttacgccctgttcgc

SEQ ID NO: 53800 - DNA, 20 bp, Neisseria gonorrhoeae
caccctgccttgcgcgacca

SEQ ID NO: 53801 - DNA, 20 bp, Neisseria gonorrhoeae
cgcgaccaattcgccgcctt

SEQ ID NO: 53802 - DNA, 20 bp, Neisseria gonorrhoeae
gccgccttctttgccgatcc

SEQ ID NO: 53803 - DNA, 20 bp, Neisseria gonorrhoeae
ggatcggcaaagaaggcggc

SEQ ID NO: 53804 - DNA, 20 bp, Neisseria gonorrhoeae
gtcgcgcaaggcagggtgga

SEQ ID NO: 53805 - DNA, 20 bp, Neisseria gonorrhoeae
ttacggggatgtattttgcc

SEQ ID NO: 53806 - DNA, 20 bp, Neisseria gonorrhoeae
cggggatgtattttgccaag

SEQ ID NO: 53807 - DNA, 20 bp, Neisseria gonorrhoeae
tgccaagtggctgggcgcgg

SEQ ID NO: 53808 - DNA, 20 bp, Neisseria gonorrhoeae
gccaagtggctgggcgcgga

SEQ ID NO: 53809 - DNA, 20 bp, Neisseria gonorrhoeae
ccaagtggctgggcgcggaa

SEQ ID NO: 53810 - DNA, 20 bp, Neisseria gonorrhoeae
ccggttacaaaatgttgaag

SEQ ID NO: 53811 - DNA, 20 bp, Neisseria gonorrhoeae
caaaatgttgaagaacacgg

SEQ ID NO: 53812 - DNA, 20 bp, Neisseria gonorrhoeae
aagaacacggtcgtcatgcc

SEQ ID NO: 53813 - DNA, 20 bp, Neisseria gonorrhoeae
gcacgcgatgggcattgccg

SEQ ID NO: 53814 - DNA, 20 bp, Neisseria gonorrhoeae
ttcaacattttgtaaccggc

SEQ ID NO: 53815 - DNA, 20 bp, Neisseria gonorrhoeae
ccgtagccgccggcagcacc

SEQ ID NO: 53816 - DNA, 20 bp, Neisseria gonorrhoeae
acgaccaaccgtttctgtgc

SEQ ID NO: 53817 - DNA, 20 bp, Neisseria gonorrhoeae
gtcgtgaagactgcaccgac

SEQ ID NO: 53818 - DNA, 20 bp, Neisseria gonorrhoeae
ggcggcggcgagtccgacgg

SEQ ID NO: 53819 - DNA, 20 bp, Neisseria gonorrhoeae
gcggcggcgagtccgacggg

SEQ ID NO: 53820 - DNA, 20 bp, Neisseria gonorrhoeae
gtagatgccgtgcagggctt

SEQ ID NO: 53821 - DNA, 20 bp, Neisseria gonorrhoeae
ggcggcttcgtggtagccgg

SEQ ID NO: 53822 - DNA, 20 bp, Neisseria gonorrhoeae
gtggtagccggtgccgtagg

SEQ ID NO: 53823 - DNA, 20 bp, Neisseria gonorrhoeae
aggctgcccgaacactgcta

SEQ ID NO: 53824 - DNA, 20 bp, Neisseria gonorrhoeae
caacctccgcatcatcgacg

SEQ ID NO: 53825 - DNA, 20 bp, Neisseria gonorrhoeae
aaatagcagtgttcgggcag

SEQ ID NO: 53826 - DNA, 20 bp, Neisseria gonorrhoeae
gggcagcctgaacgcggccc

SEQ ID NO: 53827 - DNA, 20 bp, Neisseria gonorrhoeae
gtcttggttgatttgctcga

SEQ ID NO: 53828 - DNA, 20 bp, Neisseria gonorrhoeae
atcggcgaagacaagctgcc

SEQ ID NO: 53829 - DNA, 20 bp, Neisseria gonorrhoeae
tcggcgaagacaagctgccg

SEQ ID NO: 53830 - DNA, 20 bp, Neisseria gonorrhoeae
aaagaacaaatcaaacgcgc

SEQ ID NO: 53831 - DNA, 20 bp, Neisseria gonorrhoeae
tttgacggcgggcaggcggc

SEQ ID NO: 53832 - DNA, 20 bp, Neisseria gonorrhoeae
gacggcgggcaggcggctgc

SEQ ID NO: 53833 - DNA, 20 bp, Neisseria gonorrhoeae
cacccggcttcgccacccgc

SEQ ID NO: 53834 - DNA, 20 bp, Neisseria gonorrhoeae
gccacccgcaccccgtgggc

SEQ ID NO: 53835 - DNA, 20 bp, Neisseria gonorrhoeae
gaggtagatggggaggcgcg

SEQ ID NO: 53836 - DNA, 20 bp, Neisseria gonorrhoeae
aggtagatggggaggcgcgg

SEQ ID NO: 53837 - DNA, 20 bp, Neisseria gonorrhoeae
tgcccacggggtgcgggtgg

SEQ ID NO: 53838 - DNA, 20 bp, Neisseria gonorrhoeae
ttcataataattgccggttg

SEQ ID NO: 53839 - DNA, 20 bp, Neisseria gonorrhoeae
ataataattgccggttgcct

SEQ ID NO: 53840 - DNA, 20 bp, Neisseria gonorrhoeae
ccggttgcctccatgcagat

SEQ ID NO: 53841 - DNA, 20 bp, Neisseria gonorrhoeae
cctccatgcagatatgcaga

SEQ ID NO: 53842 - DNA, 20 bp, Neisseria gonorrhoeae
tgacatcccaagcttttcaa

SEQ ID NO: 53843 - DNA, 20 bp, Neisseria gonorrhoeae
ttcaacaacaaaacacacaa

SEQ ID NO: 53844 - DNA, 20 bp, Neisseria gonorrhoeae
aacaacaaaacacacaacgc

SEQ ID NO: 53845 - DNA, 20 bp, Neisseria gonorrhoeae
cgccaccaacccataggccg

SEQ ID NO: 53846 - DNA, 20 bp, Neisseria gonorrhoeae
cagacggcctatgggttggt

SEQ ID NO: 53847 - DNA, 20 bp, Neisseria gonorrhoeae
agacggcctatgggttggtg

SEQ ID NO: 53848 - DNA, 20 bp, Neisseria gonorrhoeae
gtacgtcaaagccgacaacc

SEQ ID NO: 53849 - DNA, 20 bp, Neisseria gonorrhoeae
acgcccacagcagcttcctc

SEQ ID NO: 53850 - DNA, 20 bp, Neisseria gonorrhoeae
cgcccacagcagcttcctct

SEQ ID NO: 53851 - DNA, 20 bp, Neisseria gonorrhoeae
ctctctgatacgccgcaaat

SEQ ID NO: 53852 - DNA, 20 bp, Neisseria gonorrhoeae
gcggcgtatcagagaggaag

SEQ ID NO: 53853 - DNA, 20 bp, Neisseria gonorrhoeae
ccagccaaatcggcagcggc

SEQ ID NO: 53854 - DNA, 20 bp, Neisseria gonorrhoeae
tggacgaaccctccatcggc

SEQ ID NO: 53855 - DNA, 20 bp, Neisseria gonorrhoeae
ggacgaaccctccatcggcc

SEQ ID NO: 53856 - DNA, 20 bp, Neisseria gonorrhoeae
gacgaaccctccatcggcct

SEQ ID NO: 53857 - DNA, 20 bp, Neisseria gonorrhoeae
tcgcgctggtgcaggccgat

SEQ ID NO: 53858 - DNA, 20 bp, Neisseria gonorrhoeae
tccttcaacgtcaaaggcgg

SEQ ID NO: 53859 - DNA, 20 bp, Neisseria gonorrhoeae
aacgtcaaaggcggccgctg

SEQ ID NO: 53860 - DNA, 20 bp, Neisseria gonorrhoeae
aagtcgaaatgcacttcctc

SEQ ID NO: 53861 - DNA, 20 bp, Neisseria gonorrhoeae
cgactttaatcacgccgtcg

SEQ ID NO: 53862 - DNA, 20 bp, Neisseria gonorrhoeae
gactttaatcacgccgtcgc

SEQ ID NO: 53863 - DNA, 20 bp, Neisseria gonorrhoeae
tcctgccgcgccgcgaccgc

SEQ ID NO: 53864 - DNA, 20 bp, Neisseria gonorrhoeae
cctgccgcgccgcgaccgcg

SEQ ID NO: 53865 - DNA, 20 bp, Neisseria gonorrhoeae
ctgccgcgccgcgaccgcgt

SEQ ID NO: 53866 - DNA, 20 bp, Neisseria gonorrhoeae
acgccgcccgccgaaatagc

SEQ ID NO: 53867 - DNA, 20 bp, Neisseria gonorrhoeae
cgccgcccgccgaaatagct

SEQ ID NO: 53868 - DNA, 20 bp, Neisseria gonorrhoeae
caattcgacttcttgcgcgc

SEQ ID NO: 53869 - DNA, 20 bp, Neisseria gonorrhoeae
aattcgacttcttgcgcgcc

SEQ ID NO: 53870 - DNA, 20 bp, Neisseria gonorrhoeae
gacttcttgcgcgcccaaac

SEQ ID NO: 53871 - DNA, 20 bp, Neisseria gonorrhoeae
ttgcgcgcccaaacgcatcg

SEQ ID NO: 53872 - DNA, 20 bp, Neisseria gonorrhoeae
cgcgcccaaacgcatcgtgc

SEQ ID NO: 53873 - DNA, 20 bp, Neisseria gonorrhoeae
ttttccacgcggtcaaatcc

SEQ ID NO: 53874 - DNA, 20 bp, Neisseria gonorrhoeae
tttccacgcggtcaaatccg

SEQ ID NO: 53875 - DNA, 20 bp, Neisseria gonorrhoeae
ttccacgcggtcaaatccgc

SEQ ID NO: 53876 - DNA, 20 bp, Neisseria gonorrhoeae
tccacgcggtcaaatccgcc

SEQ ID NO: 53877 - DNA, 20 bp, Neisseria gonorrhoeae
ccacgcggtcaaatccgcct

SEQ ID NO: 53878 - DNA, 20 bp, Neisseria gonorrhoeae
cccggtcgcgtccgtccaat

SEQ ID NO: 53879 - DNA, 20 bp, Neisseria gonorrhoeae
ccggtcgcgtccgtccaatt

SEQ ID NO: 53880 - DNA, 20 bp, Neisseria gonorrhoeae
ctgcgccacaccgcgcccgc

SEQ ID NO: 53881 - DNA, 20 bp, Neisseria gonorrhoeae
ccgcgtgtttcgccgttttg

SEQ ID NO: 53882 - DNA, 20 bp, Neisseria gonorrhoeae
cgccgttttgcgggatacgc

SEQ ID NO: 53883 - DNA, 20 bp, Neisseria gonorrhoeae
cgaggatgctgccgatgttg

SEQ ID NO: 53884 - DNA, 20 bp, Neisseria gonorrhoeae
gaggatgctgccgatgttgg

SEQ ID NO: 53885 - DNA, 20 bp, Neisseria gonorrhoeae
gggtctttttcggtcaggcg

SEQ ID NO: 53886 - DNA, 20 bp, Neisseria gonorrhoeae
ttcggtcaggcggaagatgc

SEQ ID NO: 53887 - DNA, 20 bp, Neisseria gonorrhoeae
tcggtcaggcggaagatgcc

SEQ ID NO: 53888 - DNA, 20 bp, Neisseria gonorrhoeae
agcgcggcgcggtcggtttt

SEQ ID NO: 53889 - DNA, 20 bp, Neisseria gonorrhoeae
tttcgaggcggacgacggcg

SEQ ID NO: 53890 - DNA, 20 bp, Neisseria gonorrhoeae
ttcgaggcggacgacggcga

SEQ ID NO: 53891 - DNA, 20 bp, Neisseria gonorrhoeae
tcgaggcggacgacggcgac

SEQ ID NO: 53892 - DNA, 20 bp, Neisseria gonorrhoeae
cgaggcggacgacggcgact

SEQ ID NO: 53893 - DNA, 20 bp, Neisseria gonorrhoeae
gccttagtcggcttctgggt

SEQ ID NO: 53894 - DNA, 20 bp, Neisseria gonorrhoeae
gtcggcttctgggtcatcgg

SEQ ID NO: 53895 - DNA, 20 bp, Neisseria gonorrhoeae
tgggtcatcggtatgacccc

SEQ ID NO: 53896 - DNA, 20 bp, Neisseria gonorrhoeae
tgctggtgttgaccgcattc

SEQ ID NO: 53897 - DNA, 20 bp, Neisseria gonorrhoeae
gctggtgttgaccgcattca

SEQ ID NO: 53898 - DNA, 20 bp, Neisseria gonorrhoeae
ggttgagctgctgaaaaacc

SEQ ID NO: 53899 - DNA, 20 bp, Neisseria gonorrhoeae
gttgagctgctgaaaaaccc

SEQ ID NO: 53900 - DNA, 20 bp, Neisseria gonorrhoeae
agctgctgaaaaacccgccc

SEQ ID NO: 53901 - DNA, 20 bp, Neisseria gonorrhoeae
ttggtcgagctgcttgccca

SEQ ID NO: 53902 - DNA, 20 bp, Neisseria gonorrhoeae
gtcgagctgcttgcccaccg

SEQ ID NO: 53903 - DNA, 20 bp, Neisseria gonorrhoeae
ccccatcggtatttccttcc

SEQ ID NO: 53904 - DNA, 20 bp, Neisseria gonorrhoeae
cccatcggtatttccttccc

SEQ ID NO: 53905 - DNA, 20 bp, Neisseria gonorrhoeae
ccttccccgcaggttcaggc

SEQ ID NO: 53906 - DNA, 20 bp, Neisseria gonorrhoeae
cttccccgcaggttcaggct

SEQ ID NO: 53907 - DNA, 20 bp, Neisseria gonorrhoeae
cccgcaggttcaggcttggt

SEQ ID NO: 53908 - DNA, 20 bp, Neisseria gonorrhoeae
tccgacgaaggtcactacgg

SEQ ID NO: 53909 - DNA, 20 bp, Neisseria gonorrhoeae
gtcggacaactctttcgcgt

SEQ ID NO: 53910 - DNA, 20 bp, Neisseria gonorrhoeae
cgcgtccattttggtcggcg

SEQ ID NO: 53911 - DNA, 20 bp, Neisseria gonorrhoeae
gcgtccattttggtcggcgg

SEQ ID NO: 53912 - DNA, 20 bp, Neisseria gonorrhoeae
tggtcggcggcgctacccac

SEQ ID NO: 53913 - DNA, 20 bp, Neisseria gonorrhoeae
ttcaagtgcatccgcgccgg

SEQ ID NO: 53914 - DNA, 20 bp, Neisseria gonorrhoeae
aagtgcatccgcgccggctg

SEQ ID NO: 53915 - DNA, 20 bp, Neisseria gonorrhoeae
gcggctttgccgcattttcc

SEQ ID NO: 53916 - DNA, 20 bp, Neisseria gonorrhoeae
cggctttgccgcattttccg

SEQ ID NO: 53917 - DNA, 20 bp, Neisseria gonorrhoeae
gccgcattttccgcagccgg

SEQ ID NO: 53918 - DNA, 20 bp, Neisseria gonorrhoeae
ggcgtggtcggcatcgacat

SEQ ID NO: 53919 - DNA, 20 bp, Neisseria gonorrhoeae
ggtggcgatggatttgttca

SEQ ID NO: 53920 - DNA, 20 bp, Neisseria gonorrhoeae
cagacggccccgccaccatg

SEQ ID NO: 53921 - DNA, 20 bp, Neisseria gonorrhoeae
agacggccccgccaccatgt

SEQ ID NO: 53922 - DNA, 20 bp, Neisseria gonorrhoeae
cgcccggttttgccaaactc

SEQ ID NO: 53923 - DNA, 20 bp, Neisseria gonorrhoeae
tgccaaactcgatgcgatgg

SEQ ID NO: 53924 - DNA, 20 bp, Neisseria gonorrhoeae
gccaaactcgatgcgatgga

SEQ ID NO: 53925 - DNA, 20 bp, Neisseria gonorrhoeae
ccaaactcgatgcgatggaa

SEQ ID NO: 53926 - DNA, 20 bp, Neisseria gonorrhoeae
gtgcccctcaaaaggatggg

SEQ ID NO: 53927 - DNA, 20 bp, Neisseria gonorrhoeae
tgtcggcgttccactgaacg

SEQ ID NO: 53928 - DNA, 20 bp, Neisseria gonorrhoeae
cactgaacggagatttcacc

SEQ ID NO: 53929 - DNA, 20 bp, Neisseria gonorrhoeae
caccctcaacctgcccgccg

SEQ ID NO: 53930 - DNA, 20 bp, Neisseria gonorrhoeae
accctcaacctgcccgccgt

SEQ ID NO: 53931 - DNA, 20 bp, Neisseria gonorrhoeae
ctgacggcttcgaggacggc

SEQ ID NO: 53932 - DNA, 20 bp, Neisseria gonorrhoeae
cggacattcctacgtcccgc

SEQ ID NO: 53933 - DNA, 20 bp, Neisseria gonorrhoeae
tttgtcgccgagtgcctgcc

SEQ ID NO: 53934 - DNA, 20 bp, Neisseria gonorrhoeae
ttgtcgccgagtgcctgccg

SEQ ID NO: 53935 - DNA, 20 bp, Neisseria gonorrhoeae
tgtcgccgagtgcctgccgg

SEQ ID NO: 53936 - DNA, 20 bp, Neisseria gonorrhoeae
gtcgccgagtgcctgccgga

SEQ ID NO: 53937 - DNA, 20 bp, Neisseria gonorrhoeae
gacggcggcatcgaagtcgg

SEQ ID NO: 53938 - DNA, 20 bp, Neisseria gonorrhoeae
ggcggagatgggggcagttt

SEQ ID NO: 53939 - DNA, 20 bp, Neisseria gonorrhoeae
gcggagatgggggcagtttt

SEQ ID NO: 53940 - DNA, 20 bp, Neisseria gonorrhoeae
tgtcgggcgagcggttgtat

SEQ ID NO: 53941 - DNA, 20 bp, Neisseria gonorrhoeae
gtcgggcgagcggttgtata

SEQ ID NO: 53942 - DNA, 20 bp, Neisseria gonorrhoeae
caaggcatcggttttctctg

SEQ ID NO: 53943 - DNA, 20 bp, Neisseria gonorrhoeae
tctctgtgcggactgtaaaa

SEQ ID NO: 53944 - DNA, 20 bp, Neisseria gonorrhoeae
ctctgtgcggactgtaaaat

SEQ ID NO: 53945 - DNA, 20 bp, Neisseria gonorrhoeae
tctgtgcggactgtaaaatt

SEQ ID NO: 53946 - DNA, 20 bp, Neisseria gonorrhoeae
taatcataattttacagtcc

SEQ ID NO: 53947 - DNA, 20 bp, Neisseria gonorrhoeae
ggcgggcgaacccggctggc

SEQ ID NO: 53948 - DNA, 20 bp, Neisseria gonorrhoeae
gcgggcgaacccggctggcg

SEQ ID NO: 53949 - DNA, 20 bp, Neisseria gonorrhoeae
tacctttccgcaaccggcgt

SEQ ID NO: 53950 - DNA, 20 bp, Neisseria gonorrhoeae
acctttccgcaaccggcgtg

SEQ ID NO: 53951 - DNA, 20 bp, Neisseria gonorrhoeae
cctttccgcaaccggcgtgg

SEQ ID NO: 53952 - DNA, 20 bp, Neisseria gonorrhoeae
gacgacgcaaaagacctggg

SEQ ID NO: 53953 - DNA, 20 bp, Neisseria gonorrhoeae
ccgcacaaatcgaagccgac

SEQ ID NO: 53954 - DNA, 20 bp, Neisseria gonorrhoeae
gatttgtgcggcaacgagtt

SEQ ID NO: 53955 - DNA, 20 bp, Neisseria gonorrhoeae
gtgcggcaacgagtttggcc

SEQ ID NO: 53956 - DNA, 20 bp, Neisseria gonorrhoeae
tgcggcaacgagtttggccg

SEQ ID NO: 53957 - DNA, 20 bp, Neisseria gonorrhoeae
tggccgtctgaaacttcagg

SEQ ID NO: 53958 - DNA, 20 bp, Neisseria gonorrhoeae
ggccgtctgaaacttcaggc

SEQ ID NO: 53959 - DNA, 20 bp, Neisseria gonorrhoeae
gccgtctgaaacttcaggca

SEQ ID NO: 53960 - DNA, 20 bp, Neisseria gonorrhoeae
aggcagcgcgcgacctttga

SEQ ID NO: 53961 - DNA, 20 bp, Neisseria gonorrhoeae
gaccacgctcatggcgtatt

SEQ ID NO: 53962 - DNA, 20 bp, Neisseria gonorrhoeae
tggcttgccattgcctgctg

SEQ ID NO: 53963 - DNA, 20 bp, Neisseria gonorrhoeae
ccattgcctgctggctgatt

SEQ ID NO: 53964 - DNA, 20 bp, Neisseria gonorrhoeae
cctgctggctgattttcttt

SEQ ID NO: 53965 - DNA, 20 bp, Neisseria gonorrhoeae
tcttttccaccctcaacccg

SEQ ID NO: 53966 - DNA, 20 bp, Neisseria gonorrhoeae
cttttccaccctcaacccgc

SEQ ID NO: 53967 - DNA, 20 bp, Neisseria gonorrhoeae
gtcgctatgattgcctcgct

SEQ ID NO: 53968 - DNA, 20 bp, Neisseria gonorrhoeae
cctcgctgtcggtcagatac

SEQ ID NO: 53969 - DNA, 20 bp, Neisseria gonorrhoeae
cccatgaaaaccacgtcgcc

SEQ ID NO: 53970 - DNA, 20 bp, Neisseria gonorrhoeae
aagcccctgatacggcggta

SEQ ID NO: 53971 - DNA, 20 bp, Neisseria gonorrhoeae
tcatgggcaagtttgccggc

SEQ ID NO: 53972 - DNA, 20 bp, Neisseria gonorrhoeae
ccggacaagcccccgcctac

SEQ ID NO: 53973 - DNA, 20 bp, Neisseria gonorrhoeae
tgccggtgtattggtaggcg

SEQ ID NO: 53974 - DNA, 20 bp, Neisseria gonorrhoeae
gccggtgtattggtaggcgg

SEQ ID NO: 53975 - DNA, 20 bp, Neisseria gonorrhoeae
ccggtgtattggtaggcggg

SEQ ID NO: 53976 - DNA, 20 bp, Neisseria gonorrhoeae
gtaggcgggggcttgtccgg

SEQ ID NO: 53977 - DNA, 20 bp, Neisseria gonorrhoeae
tctgaactccgttaaatttg

SEQ ID NO: 53978 - DNA, 20 bp, Neisseria gonorrhoeae
ctgaactccgttaaatttga

SEQ ID NO: 53979 - DNA, 20 bp, Neisseria gonorrhoeae
tgaactccgttaaatttgat

SEQ ID NO: 53980 - DNA, 20 bp, Neisseria gonorrhoeae
aatttgatggcaagaacccg

SEQ ID NO: 53981 - DNA, 20 bp, Neisseria gonorrhoeae
gatggcaagaacccgcaacc

SEQ ID NO: 53982 - DNA, 20 bp, Neisseria gonorrhoeae
atcgcatttgacgtgtagcc

SEQ ID NO: 53983 - DNA, 20 bp, Neisseria gonorrhoeae
gacgtgtagcctttgaactt

SEQ ID NO: 53984 - DNA, 20 bp, Neisseria gonorrhoeae
acgtgtagcctttgaacttt

SEQ ID NO: 53985 - DNA, 20 bp, Neisseria gonorrhoeae
gaacttttccagtgcggcga

SEQ ID NO: 53986 - DNA, 20 bp, Neisseria gonorrhoeae
aacttttccagtgcggcgag

SEQ ID NO: 53987 - DNA, 20 bp, Neisseria gonorrhoeae
cgcgcttgcgggcgtgaggt

SEQ ID NO: 53988 - DNA, 20 bp, Neisseria gonorrhoeae
cgggcgtgaggtcgggacgc

SEQ ID NO: 53989 - DNA, 20 bp, Neisseria gonorrhoeae
cttgtacatccgccgtggtg

SEQ ID NO: 53990 - DNA, 20 bp, Neisseria gonorrhoeae
tacatccgccgtggtgttgc

SEQ ID NO: 53991 - DNA, 20 bp, Neisseria gonorrhoeae
ccttgcgcgtccctgccgaa

SEQ ID NO: 53992 - DNA, 20 bp, Neisseria gonorrhoeae
gtcaaattttagaacggacg

SEQ ID NO: 53993 - DNA, 20 bp, Neisseria gonorrhoeae
tagaacggacggaatttcat

SEQ ID NO: 53994 - DNA, 20 bp, Neisseria gonorrhoeae
agaacggacggaatttcatg

SEQ ID NO: 53995 - DNA, 20 bp, Neisseria gonorrhoeae
gaacggacggaatttcatgc

SEQ ID NO: 53996 - DNA, 20 bp, Neisseria gonorrhoeae
catgcagtggcgttagcttt

SEQ ID NO: 53997 - DNA, 20 bp, Neisseria gonorrhoeae
cgccccttccctcttcccat

SEQ ID NO: 53998 - DNA, 20 bp, Neisseria gonorrhoeae
cctcttcccattccgttgtg

SEQ ID NO: 53999 - DNA, 20 bp, Neisseria gonorrhoeae
ccattccgttgtgaaagccc

SEQ ID NO: 54000 - DNA, 20 bp, Neisseria gonorrhoeae
cgttgtgaaagcccgaaccg

SEQ ID NO: 54001 - DNA, 20 bp, Neisseria gonorrhoeae
tgaaagcccgaaccgtgcct

SEQ ID NO: 54002 - DNA, 20 bp, Neisseria gonorrhoeae
agcagccagaagccccaagt

SEQ ID NO: 54003 - DNA, 20 bp, Neisseria gonorrhoeae
gtcgtcaaaccgcgcgttcg

SEQ ID NO: 54004 - DNA, 20 bp, Neisseria gonorrhoeae
tcgtcaaaccgcgcgttcgg

SEQ ID NO: 54005 - DNA, 20 bp, Neisseria gonorrhoeae
ggtttcaagtagcgcgcaac

SEQ ID NO: 54006 - DNA, 20 bp, Neisseria gonorrhoeae
cgcgctacttgaaaccgaac

SEQ ID NO: 54007 - DNA, 20 bp, Neisseria gonorrhoeae
caaagcggagaagcaggcgc

SEQ ID NO: 54008 - DNA, 20 bp, Neisseria gonorrhoeae
ccatagaggcggaggtagag

SEQ ID NO: 54009 - DNA, 20 bp, Neisseria gonorrhoeae
cgggcacgctgcaccacctg

SEQ ID NO: 54010 - DNA, 20 bp, Neisseria gonorrhoeae
tccggctctacctccgcctc

SEQ ID NO: 54011 - DNA, 20 bp, Neisseria gonorrhoeae
tccgctttggaagtcgtgcc

SEQ ID NO: 54012 - DNA, 20 bp, Neisseria gonorrhoeae
acccacatccccgtaatcca

SEQ ID NO: 54013 - DNA, 20 bp, Neisseria gonorrhoeae
tcgaatccctgagccgttgc

SEQ ID NO: 54014 - DNA, 20 bp, Neisseria gonorrhoeae
ccgccagttgcagcgcatac

SEQ ID NO: 54015 - DNA, 20 bp, Neisseria gonorrhoeae
cagcgcatacgccgcacaac

SEQ ID NO: 54016 - DNA, 20 bp, Neisseria gonorrhoeae
tgcggcgtatgcgctgcaac

SEQ ID NO: 54017 - DNA, 20 bp, Neisseria gonorrhoeae
gcggttcgcgtgtcaatgcc

SEQ ID NO: 54018 - DNA, 20 bp, Neisseria gonorrhoeae
gcgtgtcaatgccgtcagca

SEQ ID NO: 54019 - DNA, 20 bp, Neisseria gonorrhoeae
tccggcgagcgcatcgacgt

SEQ ID NO: 54020 - DNA, 20 bp, Neisseria gonorrhoeae
tcctttggtcgcccgagcct

SEQ ID NO: 54021 - DNA, 20 bp, Neisseria gonorrhoeae
ggtcgcccgagcctgcccaa

SEQ ID NO: 54022 - DNA, 20 bp, Neisseria gonorrhoeae
agccggagcagacggcagaa

SEQ ID NO: 54023 - DNA, 20 bp, Neisseria gonorrhoeae
cgcttctgccttggcacggg

SEQ ID NO: 54024 - DNA, 20 bp, Neisseria gonorrhoeae
tgccttggcacgggcttctg

SEQ ID NO: 54025 - DNA, 20 bp, Neisseria gonorrhoeae
gcacgggcttctgcgcgtgc

SEQ ID NO: 54026 - DNA, 20 bp, Neisseria gonorrhoeae
tgcgcgtgcggcagcttcgg

SEQ ID NO: 54027 - DNA, 20 bp, Neisseria gonorrhoeae
cggcggaaaccaaacccgcc

SEQ ID NO: 54028 - DNA, 20 bp, Neisseria gonorrhoeae
gccggttttttggcatcttt

SEQ ID NO: 54029 - DNA, 20 bp, Neisseria gonorrhoeae
tttggcatctttgcctttgc

SEQ ID NO: 54030 - DNA, 20 bp, Neisseria gonorrhoeae
ttggcatctttgcctttgcc

SEQ ID NO: 54031 - DNA, 20 bp, Neisseria gonorrhoeae
tggcatctttgcctttgccg

SEQ ID NO: 54032 - DNA, 20 bp, Neisseria gonorrhoeae
ggcggcatcccacggggctt

SEQ ID NO: 54033 - DNA, 20 bp, Neisseria gonorrhoeae
gcggcatcccacggggcttt

SEQ ID NO: 54034 - DNA, 20 bp, Neisseria gonorrhoeae
gcggctgtgcagctcgatat

SEQ ID NO: 54035 - DNA, 20 bp, Neisseria gonorrhoeae
cggctgtgcagctcgatatc

SEQ ID NO: 54036 - DNA, 20 bp, Neisseria gonorrhoeae
gcaggacgtggagcagatcg

SEQ ID NO: 54037 - DNA, 20 bp, Neisseria gonorrhoeae
ttcgacatggcgtgtggtgg

SEQ ID NO: 54038 - DNA, 20 bp, Neisseria gonorrhoeae
gacatggcgtgtggtggacg

SEQ ID NO: 54039 - DNA, 20 bp, Neisseria gonorrhoeae
ctgacttcgccgaagccgct

SEQ ID NO: 54040 - DNA, 20 bp, Neisseria gonorrhoeae
tgacttcgccgaagccgctg

SEQ ID NO: 54041 - DNA, 20 bp, Neisseria gonorrhoeae
gccgaagccgctgtcgcgca

SEQ ID NO: 54042 - DNA, 20 bp, Neisseria gonorrhoeae
tccagccattcctgcgccag

SEQ ID NO: 54043 - DNA, 20 bp, Neisseria gonorrhoeae
ctgcgccagcctgccctcga

SEQ ID NO: 54044 - DNA, 20 bp, Neisseria gonorrhoeae
gccgtcctgccactcggtct

SEQ ID NO: 54045 - DNA, 20 bp, Neisseria gonorrhoeae
gagggcaggctggcgcagga

SEQ ID NO: 54046 - DNA, 20 bp, Neisseria gonorrhoeae
cgcctattttccatcgtacc

SEQ ID NO: 54047 - DNA, 20 bp, Neisseria gonorrhoeae
tccatcgtaccgaaggttgc

SEQ ID NO: 54048 - DNA, 20 bp, Neisseria gonorrhoeae
ccatcgtaccgaaggttgcc

SEQ ID NO: 54049 - DNA, 20 bp, Neisseria gonorrhoeae
catcgtaccgaaggttgccg

SEQ ID NO: 54050 - DNA, 20 bp, Neisseria gonorrhoeae
ccgccactggtccgcataca

SEQ ID NO: 54051 - DNA, 20 bp, Neisseria gonorrhoeae
ggcagctattttgaatatcc

SEQ ID NO: 54052 - DNA, 20 bp, Neisseria gonorrhoeae
tgaatatccccgaagcacgc

SEQ ID NO: 54053 - DNA, 20 bp, Neisseria gonorrhoeae
gaatatccccgaagcacgca

SEQ ID NO: 54054 - DNA, 20 bp, Neisseria gonorrhoeae
aatatccccgaagcacgcag

SEQ ID NO: 54055 - DNA, 20 bp, Neisseria gonorrhoeae
ggggcgcgcgggcttggcgt

SEQ ID NO: 54056 - DNA, 20 bp, Neisseria gonorrhoeae
ttgagggcaagcagtggata

SEQ ID NO: 54057 - DNA, 20 bp, Neisseria gonorrhoeae
agggcaagcagtggataacc

SEQ ID NO: 54058 - DNA, 20 bp, Neisseria gonorrhoeae
gcattgcagacatcggacac

SEQ ID NO: 54059 - DNA, 20 bp, Neisseria gonorrhoeae
cagacatcggacaccttgtc

SEQ ID NO: 54060 - DNA, 20 bp, Neisseria gonorrhoeae
tcgtcttttgcggttatcca

SEQ ID NO: 54061 - DNA, 20 bp, Neisseria gonorrhoeae
ttcccgttgtcgggcggaca

SEQ ID NO: 54062 - DNA, 20 bp, Neisseria gonorrhoeae
ccgttgtcgggcggacaggc

SEQ ID NO: 54063 - DNA, 20 bp, Neisseria gonorrhoeae
tcgggcggacaggcaagctg

SEQ ID NO: 54064 - DNA, 20 bp, Neisseria gonorrhoeae
ccatcgcgcggctgcctttc

SEQ ID NO: 54065 - DNA, 20 bp, Neisseria gonorrhoeae
catcgcgcggctgcctttcg

SEQ ID NO: 54066 - DNA, 20 bp, Neisseria gonorrhoeae
tcttcggcattccgaaacgc

SEQ ID NO: 54067 - DNA, 20 bp, Neisseria gonorrhoeae
ggcattccgaaacgcaacgg

SEQ ID NO: 54068 - DNA, 20 bp, Neisseria gonorrhoeae
cgaaacgcaacgggcgggcc

SEQ ID NO: 54069 - DNA, 20 bp, Neisseria gonorrhoeae
ccgcggacgatgccgagcct

SEQ ID NO: 54070 - DNA, 20 bp, Neisseria gonorrhoeae
caggctcggcatcgtccgcg

SEQ ID NO: 54071 - DNA, 20 bp, Neisseria gonorrhoeae
caacgcccactgcagatagg

SEQ ID NO: 54072 - DNA, 20 bp, Neisseria gonorrhoeae
aaaacgtcgtgagacagttt

SEQ ID NO: 54073 - DNA, 20 bp, Neisseria gonorrhoeae
aaacgtcgtgagacagtttg

SEQ ID NO: 54074 - DNA, 20 bp, Neisseria gonorrhoeae
ggtccctatctgcagtgggc

SEQ ID NO: 54075 - DNA, 20 bp, Neisseria gonorrhoeae
gtccctatctgcagtgggcg

SEQ ID NO: 54076 - DNA, 20 bp, Neisseria gonorrhoeae
ttgaaaggcttgccgtatat

SEQ ID NO: 54077 - DNA, 20 bp, Neisseria gonorrhoeae
aaaggcttgccgtatatttg

SEQ ID NO: 54078 - DNA, 20 bp, Neisseria gonorrhoeae
ccgtatatttgaacaaataa

SEQ ID NO: 54079 - DNA, 20 bp, Neisseria gonorrhoeae
gaacaaataagcaattgaac

SEQ ID NO: 54080 - DNA, 20 bp, Neisseria gonorrhoeae
aacaaataagcaattgaacg

SEQ ID NO: 54081 - DNA, 20 bp, Neisseria gonorrhoeae
tgatgccgtctgttttcgac

SEQ ID NO: 54082 - DNA, 20 bp, Neisseria gonorrhoeae
tcgacattcccgcaggcagc

SEQ ID NO: 54083 - DNA, 20 bp, Neisseria gonorrhoeae
cgacattcccgcaggcagca

SEQ ID NO: 54084 - DNA, 20 bp, Neisseria gonorrhoeae
gacattcccgcaggcagcag

SEQ ID NO: 54085 - DNA, 20 bp, Neisseria gonorrhoeae
ccgcaggcagcagatcgacc

SEQ ID NO: 54086 - DNA, 20 bp, Neisseria gonorrhoeae
tgaccgtgcgcgaaaaatgg

SEQ ID NO: 54087 - DNA, 20 bp, Neisseria gonorrhoeae
tgccaaaatttcacgcccca

SEQ ID NO: 54088 - DNA, 20 bp, Neisseria gonorrhoeae
cacgccccagtagttggtgg

SEQ ID NO: 54089 - DNA, 20 bp, Neisseria gonorrhoeae
acgccccagtagttggtggt

SEQ ID NO: 54090 - DNA, 20 bp, Neisseria gonorrhoeae
gtggtgttcgcctgtacgga

SEQ ID NO: 54091 - DNA, 20 bp, Neisseria gonorrhoeae
gcggcaactgccgcgacgaa

SEQ ID NO: 54092 - DNA, 20 bp, Neisseria gonorrhoeae
cccggaatgcggctgccgta

SEQ ID NO: 54093 - DNA, 20 bp, Neisseria gonorrhoeae
cgggcaatctaccgtatgcg

SEQ ID NO: 54094 - DNA, 20 bp, Neisseria gonorrhoeae
gtcgcggcagttgccgcgaa

SEQ ID NO: 54095 - DNA, 20 bp, Neisseria gonorrhoeae
cgtcggcgtttctgacggcg

SEQ ID NO: 54096 - DNA, 20 bp, Neisseria gonorrhoeae
tcggccgtcggcggtacagt

SEQ ID NO: 54097 - DNA, 20 bp, Neisseria gonorrhoeae
cggccgtcggcggtacagtt

SEQ ID NO: 54098 - DNA, 20 bp, Neisseria gonorrhoeae
ggccgtcggcggtacagttc

SEQ ID NO: 54099 - DNA, 20 bp, Neisseria gonorrhoeae
cgcgccgcacaccccgcagg

SEQ ID NO: 54100 - DNA, 20 bp, Neisseria gonorrhoeae
tgggtggtcaagccgcgtat

SEQ ID NO: 54101 - DNA, 20 bp, Neisseria gonorrhoeae
cgccgctttggtcgatacgc

SEQ ID NO: 54102 - DNA, 20 bp, Neisseria gonorrhoeae
ggtcgatacgcggcttgacc

SEQ ID NO: 54103 - DNA, 20 bp, Neisseria gonorrhoeae
gtcgatacgcggcttgacca

SEQ ID NO: 54104 - DNA, 20 bp, Neisseria gonorrhoeae
accacccagaactgggtatc

SEQ ID NO: 54105 - DNA, 20 bp, Neisseria gonorrhoeae
gacgatatgctcgaagcggc

SEQ ID NO: 54106 - DNA, 20 bp, Neisseria gonorrhoeae
agcaatgcattcaaccgttt

SEQ ID NO: 54107 - DNA, 20 bp, Neisseria gonorrhoeae
aaccgtttggacagcacacg

SEQ ID NO: 54108 - DNA, 20 bp, Neisseria gonorrhoeae
ggacagcacacgcacctttg

SEQ ID NO: 54109 - DNA, 20 bp, Neisseria gonorrhoeae
gacagcacacgcacctttgt

SEQ ID NO: 54110 - DNA, 20 bp, Neisseria gonorrhoeae
cggcgacgaagcggcgttgc

SEQ ID NO: 54111 - DNA, 20 bp, Neisseria gonorrhoeae
ggcgacgaagcggcgttgct

SEQ ID NO: 54112 - DNA, 20 bp, Neisseria gonorrhoeae
cttgccgctgtcggcgagaa

SEQ ID NO: 54113 - DNA, 20 bp, Neisseria gonorrhoeae
ccgctgtcggcgagaagagc

SEQ ID NO: 54114 - DNA, 20 bp, Neisseria gonorrhoeae
gtcggcaacaccttgccgca

SEQ ID NO: 54115 - DNA, 20 bp, Neisseria gonorrhoeae
ccctgtggcgggcgcgtctt

SEQ ID NO: 54116 - DNA, 20 bp, Neisseria gonorrhoeae
cctgtggcgggcgcgtcttt

SEQ ID NO: 54117 - DNA, 20 bp, Neisseria gonorrhoeae
gttggacgaagcgaccgccg

SEQ ID NO: 54118 - DNA, 20 bp, Neisseria gonorrhoeae
ttggacgaagcgaccgccgc

SEQ ID NO: 54119 - DNA, 20 bp, Neisseria gonorrhoeae
gacgaagcgaccgccgccgc

SEQ ID NO: 54120 - DNA, 20 bp, Neisseria gonorrhoeae
gcaccggggcataccctgac

SEQ ID NO: 54121 - DNA, 20 bp, Neisseria gonorrhoeae
ccgccgcagccttcggttct

SEQ ID NO: 54122 - DNA, 20 bp, Neisseria gonorrhoeae
gcccggcacttgcgctgtgg

SEQ ID NO: 54123 - DNA, 20 bp, Neisseria gonorrhoeae
cccggcacttgcgctgtggg

SEQ ID NO: 54124 - DNA, 20 bp, Neisseria gonorrhoeae
cgctgtgggtgtcggtcagg

SEQ ID NO: 54125 - DNA, 20 bp, Neisseria gonorrhoeae
ccttccctgttgccggcacg

SEQ ID NO: 54126 - DNA, 20 bp, Neisseria gonorrhoeae
cttccctgttgccggcacgc

SEQ ID NO: 54127 - DNA, 20 bp, Neisseria gonorrhoeae
cctgttgccggcacgctgat

SEQ ID NO: 54128 - DNA, 20 bp, Neisseria gonorrhoeae
ccggcacgctgatgatcgaa

SEQ ID NO: 54129 - DNA, 20 bp, Neisseria gonorrhoeae
atcgccgccctgaaatccat

SEQ ID NO: 54130 - DNA, 20 bp, Neisseria gonorrhoeae
ccgctgcccctcgtgcgcga

SEQ ID NO: 54131 - DNA, 20 bp, Neisseria gonorrhoeae
tgttcgcgcacgaggggcag

SEQ ID NO: 54132 - DNA, 20 bp, Neisseria gonorrhoeae
gcgcacgaggggcagcggga

SEQ ID NO: 54133 - DNA, 20 bp, Neisseria gonorrhoeae
ttcgcgagagtacggatgcg

SEQ ID NO: 54134 - DNA, 20 bp, Neisseria gonorrhoeae
gcgagagtacggatgcgccc

SEQ ID NO: 54135 - DNA, 20 bp, Neisseria gonorrhoeae
tttaccgtcaacgccgaccg

SEQ ID NO: 54136 - DNA, 20 bp, Neisseria gonorrhoeae
ttaccgtcaacgccgaccgc

SEQ ID NO: 54137 - DNA, 20 bp, Neisseria gonorrhoeae
taccgtcaacgccgaccgca

SEQ ID NO: 54138 - DNA, 20 bp, Neisseria gonorrhoeae
accgtcaacgccgaccgcag

SEQ ID NO: 54139 - DNA, 20 bp, Neisseria gonorrhoeae
ccgtcaacgccgaccgcagg

SEQ ID NO: 54140 - DNA, 20 bp, Neisseria gonorrhoeae
cctttgccgaacaacaaatg

SEQ ID NO: 54141 - DNA, 20 bp, Neisseria gonorrhoeae
gccgaacaacaaatgctgca

SEQ ID NO: 54142 - DNA, 20 bp, Neisseria gonorrhoeae
ccgaacaacaaatgctgcac

SEQ ID NO: 54143 - DNA, 20 bp, Neisseria gonorrhoeae
gttgttcggcaaaggcaacc

SEQ ID NO: 54144 - DNA, 20 bp, Neisseria gonorrhoeae
ttgttcggcaaaggcaaccc

SEQ ID NO: 54145 - DNA, 20 bp, Neisseria gonorrhoeae
agcactttgccgcgcagggg

SEQ ID NO: 54146 - DNA, 20 bp, Neisseria gonorrhoeae
gccgcgcaggggcaggatgg

SEQ ID NO: 54147 - DNA, 20 bp, Neisseria gonorrhoeae
ccgcgcaggggcaggatggc

SEQ ID NO: 54148 - DNA, 20 bp, Neisseria gonorrhoeae
tgtggctttgtcgcgggcga

SEQ ID NO: 54149 - DNA, 20 bp, Neisseria gonorrhoeae
gtcgcgggcgagtttggcgg

SEQ ID NO: 54150 - DNA, 20 bp, Neisseria gonorrhoeae
tcagaccgtcggggtaatgc

SEQ ID NO: 54151 - DNA, 20 bp, Neisseria gonorrhoeae
cagaccgtcggggtaatgcc

SEQ ID NO: 54152 - DNA, 20 bp, Neisseria gonorrhoeae
agaccgtcggggtaatgcca

SEQ ID NO: 54153 - DNA, 20 bp, Neisseria gonorrhoeae
gggtgtgcgcttcgtcttcg

SEQ ID NO: 54154 - DNA, 20 bp, Neisseria gonorrhoeae
ggtgtgcgcttcgtcttcgc

SEQ ID NO: 54155 - DNA, 20 bp, Neisseria gonorrhoeae
tcgatgacttcttggcagat

SEQ ID NO: 54156 - DNA, 20 bp, Neisseria gonorrhoeae
ttggcagatatgtgtcgggc

SEQ ID NO: 54157 - DNA, 20 bp, Neisseria gonorrhoeae
gcagatatgtgtcgggctgt

SEQ ID NO: 54158 - DNA, 20 bp, Neisseria gonorrhoeae
gggcgaataggcaggcacgc

SEQ ID NO: 54159 - DNA, 20 bp, Neisseria gonorrhoeae
caagcccaactcttcagccg

SEQ ID NO: 54160 - DNA, 20 bp, Neisseria gonorrhoeae
aagcccaactcttcagccgc

SEQ ID NO: 54161 - DNA, 20 bp, Neisseria gonorrhoeae
agccgccttcaaatccacat

SEQ ID NO: 54162 - DNA, 20 bp, Neisseria gonorrhoeae
aaatccacattattgaagcc

SEQ ID NO: 54163 - DNA, 20 bp, Neisseria gonorrhoeae
gagctcgtccgcttcgggca

SEQ ID NO: 54164 - DNA, 20 bp, Neisseria gonorrhoeae
gggcatgacggcaacggtac

SEQ ID NO: 54165 - DNA, 20 bp, Neisseria gonorrhoeae
gctttcggtggcggggacgc

SEQ ID NO: 54166 - DNA, 20 bp, Neisseria gonorrhoeae
cggtggcggggacgcgctgc

SEQ ID NO: 54167 - DNA, 20 bp, Neisseria gonorrhoeae
ggtggcggggacgcgctgca

SEQ ID NO: 54168 - DNA, 20 bp, Neisseria gonorrhoeae
ccgtgtccgtagctttgcag

SEQ ID NO: 54169 - DNA, 20 bp, Neisseria gonorrhoeae
gcaggataagggcttgggcg

SEQ ID NO: 54170 - DNA, 20 bp, Neisseria gonorrhoeae
caggataagggcttgggcgg

SEQ ID NO: 54171 - DNA, 20 bp, Neisseria gonorrhoeae
ggcgggaagctgtccgagcc

SEQ ID NO: 54172 - DNA, 20 bp, Neisseria gonorrhoeae
ttggacggcaaagccgggga

SEQ ID NO: 54173 - DNA, 20 bp, Neisseria gonorrhoeae
gggatgcggacattgtgcca

SEQ ID NO: 54174 - DNA, 20 bp, Neisseria gonorrhoeae
tgccagccccgggtttcgtc

SEQ ID NO: 54175 - DNA, 20 bp, Neisseria gonorrhoeae
cgtcccactcggcaagtgcg

SEQ ID NO: 54176 - DNA, 20 bp, Neisseria gonorrhoeae
gtcccactcggcaagtgcgc

SEQ ID NO: 54177 - DNA, 20 bp, Neisseria gonorrhoeae
cggcaatgcccatttcggcg

SEQ ID NO: 54178 - DNA, 20 bp, Neisseria gonorrhoeae
acgcccaacgcttcccacac

SEQ ID NO: 54179 - DNA, 20 bp, Neisseria gonorrhoeae
ccacaccttcaacgcgtccg

SEQ ID NO: 54180 - DNA, 20 bp, Neisseria gonorrhoeae
aacgcgtccgccgtcgcctt

SEQ ID NO: 54181 - DNA, 20 bp, Neisseria gonorrhoeae
acatcgtgcacgcgcacgat

SEQ ID NO: 54182 - DNA, 20 bp, Neisseria gonorrhoeae
aaggtgtgggaagcgttggg

SEQ ID NO: 54183 - DNA, 20 bp, Neisseria gonorrhoeae
ccccgccgccgaaagccacg

SEQ ID NO: 54184 - DNA, 20 bp, Neisseria gonorrhoeae
cccgccgccgaaagccacgc

SEQ ID NO: 54185 - DNA, 20 bp, Neisseria gonorrhoeae
ggcggcaacgcggctgtctt

SEQ ID NO: 54186 - DNA, 20 bp, Neisseria gonorrhoeae
gcggcaacgcggctgtcttc

SEQ ID NO: 54187 - DNA, 20 bp, Neisseria gonorrhoeae
cgcccgattttcccgactga

SEQ ID NO: 54188 - DNA, 20 bp, Neisseria gonorrhoeae
gcaataaagaatacgcacca

SEQ ID NO: 54189 - DNA, 20 bp, Neisseria gonorrhoeae
cccggcgggtatagcgcacg

SEQ ID NO: 54190 - DNA, 20 bp, Neisseria gonorrhoeae
ttcaggcaggtcgggctgtt

SEQ ID NO: 54191 - DNA, 20 bp, Neisseria gonorrhoeae
tcaggcaggtcgggctgttg

SEQ ID NO: 54192 - DNA, 20 bp, Neisseria gonorrhoeae
caggcaggtcgggctgttgc

SEQ ID NO: 54193 - DNA, 20 bp, Neisseria gonorrhoeae
cggaaatcttcagcctgcag

SEQ ID NO: 54194 - DNA, 20 bp, Neisseria gonorrhoeae
agcctgcagcttgcgggctg

SEQ ID NO: 54195 - DNA, 20 bp, Neisseria gonorrhoeae
cgggctgccacaaccattca

SEQ ID NO: 54196 - DNA, 20 bp, Neisseria gonorrhoeae
acgattgcgatatacccggc

SEQ ID NO: 54197 - DNA, 20 bp, Neisseria gonorrhoeae
cgatatacccggcggcattc

SEQ ID NO: 54198 - DNA, 20 bp, Neisseria gonorrhoeae
ctcaaacggcggcgccgcat

SEQ ID NO: 54199 - DNA, 20 bp, Neisseria gonorrhoeae
gagtaaggcggcgcgtttgg

SEQ ID NO: 54200 - DNA, 20 bp, Neisseria gonorrhoeae
agtaaggcggcgcgtttggt

SEQ ID NO: 54201 - DNA, 20 bp, Neisseria gonorrhoeae
ggtatgcgacgcggcttggg

SEQ ID NO: 54202 - DNA, 20 bp, Neisseria gonorrhoeae
gtatgcgacgcggcttggga

SEQ ID NO: 54203 - DNA, 20 bp, Neisseria gonorrhoeae
gggcagaaatgcgcgcgtgt

SEQ ID NO: 54204 - DNA, 20 bp, Neisseria gonorrhoeae
ggcagaaatgcgcgcgtgtt

SEQ ID NO: 54205 - DNA, 20 bp, Neisseria gonorrhoeae
cagtttgacgtgtccgaccg

SEQ ID NO: 54206 - DNA, 20 bp, Neisseria gonorrhoeae
gacgtgtccgaccgcgaagc

SEQ ID NO: 54207 - DNA, 20 bp, Neisseria gonorrhoeae
acgtgtccgaccgcgaagcc

SEQ ID NO: 54208 - DNA, 20 bp, Neisseria gonorrhoeae
cgcccgaagacatcggccgg

SEQ ID NO: 54209 - DNA, 20 bp, Neisseria gonorrhoeae
atctgcacggcaccgggacg

SEQ ID NO: 54210 - DNA, 20 bp, Neisseria gonorrhoeae
ccgaaaaccgctgcaacggc

SEQ ID NO: 54211 - DNA, 20 bp, Neisseria gonorrhoeae
ccatactgtcgttgtggtgc

SEQ ID NO: 54212 - DNA, 20 bp, Neisseria gonorrhoeae
catactgtcgttgtggtgcg

SEQ ID NO: 54213 - DNA, 20 bp, Neisseria gonorrhoeae
ccgaccggcaaagcaatccc

SEQ ID NO: 54214 - DNA, 20 bp, Neisseria gonorrhoeae
cgccccggctttgggacggg

SEQ ID NO: 54215 - DNA, 20 bp, Neisseria gonorrhoeae
gggacgggcagaacgacccc

SEQ ID NO: 54216 - DNA, 20 bp, Neisseria gonorrhoeae
ggacgggcagaacgaccccg

SEQ ID NO: 54217 - DNA, 20 bp, Neisseria gonorrhoeae
atggcgggcaggtcggggtc

SEQ ID NO: 54218 - DNA, 20 bp, Neisseria gonorrhoeae
aggaggcggtatgggcaggc

SEQ ID NO: 54219 - DNA, 20 bp, Neisseria gonorrhoeae
ggaggcggtatgggcaggca

SEQ ID NO: 54220 - DNA, 20 bp, Neisseria gonorrhoeae
cgggcgcagacgttttctga

SEQ ID NO: 54221 - DNA, 20 bp, Neisseria gonorrhoeae
gggcgcagacgttttctgac

SEQ ID NO: 54222 - DNA, 20 bp, Neisseria gonorrhoeae
tctgacggctgccgccgttg

SEQ ID NO: 54223 - DNA, 20 bp, Neisseria gonorrhoeae
gcgtttgcctgtttgagcgc

SEQ ID NO: 54224 - DNA, 20 bp, Neisseria gonorrhoeae
gcctgtttgagcgcgtgttc

SEQ ID NO: 54225 - DNA, 20 bp, Neisseria gonorrhoeae
cctgtttgagcgcgtgttcg

SEQ ID NO: 54226 - DNA, 20 bp, Neisseria gonorrhoeae
gagcgcgtgttcggcggcgc

SEQ ID NO: 54227 - DNA, 20 bp, Neisseria gonorrhoeae
agcgcgtgttcggcggcgcg

SEQ ID NO: 54228 - DNA, 20 bp, Neisseria gonorrhoeae
gtaagatgccgcacccagtc

SEQ ID NO: 54229 - DNA, 20 bp, Neisseria gonorrhoeae
tagctgctgctgacattgcc

SEQ ID NO: 54230 - DNA, 20 bp, Neisseria gonorrhoeae
ccgccgctcaagctgccttg

SEQ ID NO: 54231 - DNA, 20 bp, Neisseria gonorrhoeae
gcgcgagccgttcgcattgg

SEQ ID NO: 54232 - DNA, 20 bp, Neisseria gonorrhoeae
ccgccaatgcgaacggctcg

SEQ ID NO: 54233 - DNA, 20 bp, Neisseria gonorrhoeae
tgcctcttcgcgcgactgtc

SEQ ID NO: 54234 - DNA, 20 bp, Neisseria gonorrhoeae
gcctcttcgcgcgactgtcc

SEQ ID NO: 54235 - DNA, 20 bp, Neisseria gonorrhoeae
cctcttcgcgcgactgtccg

SEQ ID NO: 54236 - DNA, 20 bp, Neisseria gonorrhoeae
gcgcgactgtccgccccatt

SEQ ID NO: 54237 - DNA, 20 bp, Neisseria gonorrhoeae
gaggctgtaaccgccgccca

SEQ ID NO: 54238 - DNA, 20 bp, Neisseria gonorrhoeae
ccaatgcggtgcggatgtcg

SEQ ID NO: 54239 - DNA, 20 bp, Neisseria gonorrhoeae
cgccgccgctgcggcacggt

SEQ ID NO: 54240 - DNA, 20 bp, Neisseria gonorrhoeae
cgtttgccgacatccgcacc

SEQ ID NO: 54241 - DNA, 20 bp, Neisseria gonorrhoeae
gtttgccgacatccgcaccg

SEQ ID NO: 54242 - DNA, 20 bp, Neisseria gonorrhoeae
gccgacatccgcaccgcatt

SEQ ID NO: 54243 - DNA, 20 bp, Neisseria gonorrhoeae
gtcgcacccgcaggcagttg

SEQ ID NO: 54244 - DNA, 20 bp, Neisseria gonorrhoeae
cacgctaaccataacgaagc

SEQ ID NO: 54245 - DNA, 20 bp, Neisseria gonorrhoeae
gtcttcggtcggcaggaacg

SEQ ID NO: 54246 - DNA, 20 bp, Neisseria gonorrhoeae
ggtcggcaggaacgaagtcg

SEQ ID NO: 54247 - DNA, 20 bp, Neisseria gonorrhoeae
tgggcgtgttcctgtttatg

SEQ ID NO: 54248 - DNA, 20 bp, Neisseria gonorrhoeae
gggaaaaatcttgtccttcg

SEQ ID NO: 54249 - DNA, 20 bp, Neisseria gonorrhoeae
ggaaaaatcttgtccttcgc

SEQ ID NO: 54250 - DNA, 20 bp, Neisseria gonorrhoeae
tccttcgcggcgcgccccga

SEQ ID NO: 54251 - DNA, 20 bp, Neisseria gonorrhoeae
gcggcgcgccccgatatagg

SEQ ID NO: 54252 - DNA, 20 bp, Neisseria gonorrhoeae
cggcgatttgctccgcgtgt

SEQ ID NO: 54253 - DNA, 20 bp, Neisseria gonorrhoeae
ggcgggatgtttggcaacca

SEQ ID NO: 54254 - DNA, 20 bp, Neisseria gonorrhoeae
gcgggatgtttggcaaccag

SEQ ID NO: 54255 - DNA, 20 bp, Neisseria gonorrhoeae
ggcaaccaggtcgaatacgg

SEQ ID NO: 54256 - DNA, 20 bp, Neisseria gonorrhoeae
gcaaccaggtcgaatacggc

SEQ ID NO: 54257 - DNA, 20 bp, Neisseria gonorrhoeae
ggtattgcggggaaaatctc

SEQ ID NO: 54258 - DNA, 20 bp, Neisseria gonorrhoeae
cgctgtcgaggaagcggcgg

SEQ ID NO: 54259 - DNA, 20 bp, Neisseria gonorrhoeae
gctgtcgaggaagcggcgga

SEQ ID NO: 54260 - DNA, 20 bp, Neisseria gonorrhoeae
tccggacagttgccgccgca

SEQ ID NO: 54261 - DNA, 20 bp, Neisseria gonorrhoeae
ccggacagttgccgccgcac

SEQ ID NO: 54262 - DNA, 20 bp, Neisseria gonorrhoeae
cggacagttgccgccgcaca

SEQ ID NO: 54263 - DNA, 20 bp, Neisseria gonorrhoeae
tccgaccgtcgcgggctgcc

SEQ ID NO: 54264 - DNA, 20 bp, Neisseria gonorrhoeae
ctcgaaaccctgtcggatat

SEQ ID NO: 54265 - DNA, 20 bp, Neisseria gonorrhoeae
cccggatatggcggcagccc

SEQ ID NO: 54266 - DNA, 20 bp, Neisseria gonorrhoeae
gggcagcatccagcccaata

SEQ ID NO: 54267 - DNA, 20 bp, Neisseria gonorrhoeae
caggtaaacagctgatccgt

SEQ ID NO: 54268 - DNA, 20 bp, Neisseria gonorrhoeae
ggacggagaaatgcgcggcg

SEQ ID NO: 54269 - DNA, 20 bp, Neisseria gonorrhoeae
gacggagaaatgcgcggcgg

SEQ ID NO: 54270 - DNA, 20 bp, Neisseria gonorrhoeae
acctggaagcaggcggtaga

SEQ ID NO: 54271 - DNA, 20 bp, Neisseria gonorrhoeae
gaggatttgcgccgcttcga

SEQ ID NO: 54272 - DNA, 20 bp, Neisseria gonorrhoeae
aggatttgcgccgcttcgat

SEQ ID NO: 54273 - DNA, 20 bp, Neisseria gonorrhoeae
gcgccgcttcgatgacgttg

SEQ ID NO: 54274 - DNA, 20 bp, Neisseria gonorrhoeae
cgccgcttcgatgacgttgc

SEQ ID NO: 54275 - DNA, 20 bp, Neisseria gonorrhoeae
gatgacgttgccccaatgca

SEQ ID NO: 54276 - DNA, 20 bp, Neisseria gonorrhoeae
gccggccgggaactgactcc

SEQ ID NO: 54277 - DNA, 20 bp, Neisseria gonorrhoeae
ccggccgggaactgactcca

SEQ ID NO: 54278 - DNA, 20 bp, Neisseria gonorrhoeae
ccgccccaaatacctgccca

SEQ ID NO: 54279 - DNA, 20 bp, Neisseria gonorrhoeae
attttactgttgttctgcct

SEQ ID NO: 54280 - DNA, 20 bp, Neisseria gonorrhoeae
tactgttgttctgcctgtcg

SEQ ID NO: 54281 - DNA, 20 bp, Neisseria gonorrhoeae
agcaggtggatgcggtgcca

SEQ ID NO: 54282 - DNA, 20 bp, Neisseria gonorrhoeae
gtcggaatagcggccgccca

SEQ ID NO: 54283 - DNA, 20 bp, Neisseria gonorrhoeae
caaacgtaccggtcctgatt

SEQ ID NO: 54284 - DNA, 20 bp, Neisseria gonorrhoeae
ggcacgtgtgggcggccgct

SEQ ID NO: 54285 - DNA, 20 bp, Neisseria gonorrhoeae
gcacgtgtgggcggccgcta

SEQ ID NO: 54286 - DNA, 20 bp, Neisseria gonorrhoeae
tcacgcgtggaacgtcaaat

SEQ ID NO: 54287 - DNA, 20 bp, Neisseria gonorrhoeae
cacgcgtggaacgtcaaatc

SEQ ID NO: 54288 - DNA, 20 bp, Neisseria gonorrhoeae
acgcgtggaacgtcaaatcc

SEQ ID NO: 54289 - DNA, 20 bp, Neisseria gonorrhoeae
gccccttatgacctcgacaa

SEQ ID NO: 54290 - DNA, 20 bp, Neisseria gonorrhoeae
tgacctcgacaaagaaaact

SEQ ID NO: 54291 - DNA, 20 bp, Neisseria gonorrhoeae
tcgagttggacacggccttc

SEQ ID NO: 54292 - DNA, 20 bp, Neisseria gonorrhoeae
gacacggccttcttcgcgca

SEQ ID NO: 54293 - DNA, 20 bp, Neisseria gonorrhoeae
ttcgcgcacggtgtcggcgt

SEQ ID NO: 54294 - DNA, 20 bp, Neisseria gonorrhoeae
gcgcacggtgtcggcgtttt

SEQ ID NO: 54295 - DNA, 20 bp, Neisseria gonorrhoeae
tgctggcggatgtaggcgcg

SEQ ID NO: 54296 - DNA, 20 bp, Neisseria gonorrhoeae
tgcgcgacgtatccgacgcg

SEQ ID NO: 54297 - DNA, 20 bp, Neisseria gonorrhoeae
gcgcgacgtatccgacgcgc

SEQ ID NO: 54298 - DNA, 20 bp, Neisseria gonorrhoeae
cgcgacgtatccgacgcgct

SEQ ID NO: 54299 - DNA, 20 bp, Neisseria gonorrhoeae
ccgccgtacaaacccagtcc

SEQ ID NO: 54300 - DNA, 20 bp, Neisseria gonorrhoeae
gtacggcggtaacgttgagt

SEQ ID NO: 54301 - DNA, 20 bp, Neisseria gonorrhoeae
cgaatacgtcggtgtcggcg

SEQ ID NO: 54302 - DNA, 20 bp, Neisseria gonorrhoeae
gggcggtacgacttcgatgc

SEQ ID NO: 54303 - DNA, 20 bp, Neisseria gonorrhoeae
gatgccgcgcaggtagaaga

SEQ ID NO: 54304 - DNA, 20 bp, Neisseria gonorrhoeae
tacctgcgcggcatcgaagt

SEQ ID NO: 54305 - DNA, 20 bp, Neisseria gonorrhoeae
gtaaccgtcgacgtattcgg

SEQ ID NO: 54306 - DNA, 20 bp, Neisseria gonorrhoeae
tgttgcccgaaccttggtcg

SEQ ID NO: 54307 - DNA, 20 bp, Neisseria gonorrhoeae
cccgaaccttggtcgcccat

SEQ ID NO: 54308 - DNA, 20 bp, Neisseria gonorrhoeae
gtcgcccataacggagacgt

SEQ ID NO: 54309 - DNA, 20 bp, Neisseria gonorrhoeae
acgtctccgttatgggcgac

SEQ ID NO: 54310 - DNA, 20 bp, Neisseria gonorrhoeae
cgtctccgttatgggcgacc

SEQ ID NO: 54311 - DNA, 20 bp, Neisseria gonorrhoeae
cgaccggcaatatgggtgta

SEQ ID NO: 54312 - DNA, 20 bp, Neisseria gonorrhoeae
ccagcccggcatggagcttt

SEQ ID NO: 54313 - DNA, 20 bp, Neisseria gonorrhoeae
cagcccggcatggagctttg

SEQ ID NO: 54314 - DNA, 20 bp, Neisseria gonorrhoeae
gccgcgcccaaagctccatg

SEQ ID NO: 54315 - DNA, 20 bp, Neisseria gonorrhoeae
ccgcgcccaaagctccatgc

SEQ ID NO: 54316 - DNA, 20 bp, Neisseria gonorrhoeae
gcaagttgcagcgtaatgcc

SEQ ID NO: 54317 - DNA, 20 bp, Neisseria gonorrhoeae
cagcgtaatgcctgccaatc

SEQ ID NO: 54318 - DNA, 20 bp, Neisseria gonorrhoeae
ccggcaagtttgtcggacac

SEQ ID NO: 54319 - DNA, 20 bp, Neisseria gonorrhoeae
gtcggacacctcatcatcct

SEQ ID NO: 54320 - DNA, 20 bp, Neisseria gonorrhoeae
tcggacacctcatcatcctc

SEQ ID NO: 54321 - DNA, 20 bp, Neisseria gonorrhoeae
cgcgctttctcgccctcgtc

SEQ ID NO: 54322 - DNA, 20 bp, Neisseria gonorrhoeae
ctcgccctcgtcccgcaagg

SEQ ID NO: 54323 - DNA, 20 bp, Neisseria gonorrhoeae
tcgccctcgtcccgcaaggc

SEQ ID NO: 54324 - DNA, 20 bp, Neisseria gonorrhoeae
atcagcggaacgctctgcct

SEQ ID NO: 54325 - DNA, 20 bp, Neisseria gonorrhoeae
ccgaatttgtcaggcagcag

SEQ ID NO: 54326 - DNA, 20 bp, Neisseria gonorrhoeae
ggcgttaacaccgagcttgt

SEQ ID NO: 54327 - DNA, 20 bp, Neisseria gonorrhoeae
acaccgagcttgtcgcacaa

SEQ ID NO: 54328 - DNA, 20 bp, Neisseria gonorrhoeae
tcgcacaactcctgtgcacg

SEQ ID NO: 54329 - DNA, 20 bp, Neisseria gonorrhoeae
tgcgacaagctcggtgttaa

SEQ ID NO: 54330 - DNA, 20 bp, Neisseria gonorrhoeae
acgccgaaccgtgcctgctg

SEQ ID NO: 54331 - DNA, 20 bp, Neisseria gonorrhoeae
tacagactcaaccacaccgg

SEQ ID NO: 54332 - DNA, 20 bp, Neisseria gonorrhoeae
acagactcaaccacaccgga

SEQ ID NO: 54333 - DNA, 20 bp, Neisseria gonorrhoeae
cagactcaaccacaccggac

SEQ ID NO: 54334 - DNA, 20 bp, Neisseria gonorrhoeae
ttcggcggcgaggttcgcac

SEQ ID NO: 54335 - DNA, 20 bp, Neisseria gonorrhoeae
ggcggcgaggttcgcaccga

SEQ ID NO: 54336 - DNA, 20 bp, Neisseria gonorrhoeae
ccaaagccgcacaagccttt

SEQ ID NO: 54337 - DNA, 20 bp, Neisseria gonorrhoeae
cccgacgcttcggcaatatt

SEQ ID NO: 54338 - DNA, 20 bp, Neisseria gonorrhoeae
ccgacgcttcggcaatattc

SEQ ID NO: 54339 - DNA, 20 bp, Neisseria gonorrhoeae
ggcaatattcgaacgcaata

SEQ ID NO: 54340 - DNA, 20 bp, Neisseria gonorrhoeae
cgttcgaatattgccgaagc

SEQ ID NO: 54341 - DNA, 20 bp, Neisseria gonorrhoeae
gtcccctccgcctgcggtgg

SEQ ID NO: 54342 - DNA, 20 bp, Neisseria gonorrhoeae
tcccctccgcctgcggtggc

SEQ ID NO: 54343 - DNA, 20 bp, Neisseria gonorrhoeae
gtgcggacaatgccgcgttg

SEQ ID NO: 54344 - DNA, 20 bp, Neisseria gonorrhoeae
tcgtgaaaagcggcggcggc

SEQ ID NO: 54345 - DNA, 20 bp, Neisseria gonorrhoeae
tcacgacaacgcggcattgt

SEQ ID NO: 54346 - DNA, 20 bp, Neisseria gonorrhoeae
tgctcgtttgccaaagcgcg

SEQ ID NO: 54347 - DNA, 20 bp, Neisseria gonorrhoeae
gctcgtttgccaaagcgcgc

SEQ ID NO: 54348 - DNA, 20 bp, Neisseria gonorrhoeae
ctcgtttgccaaagcgcgca

SEQ ID NO: 54349 - DNA, 20 bp, Neisseria gonorrhoeae
gccaaagcgcgcagttgttc

SEQ ID NO: 54350 - DNA, 20 bp, Neisseria gonorrhoeae
ccaaagcgcgcagttgttcg

SEQ ID NO: 54351 - DNA, 20 bp, Neisseria gonorrhoeae
cagacgtgccgccgtccatc

SEQ ID NO: 54352 - DNA, 20 bp, Neisseria gonorrhoeae
agacgtgccgccgtccatca

SEQ ID NO: 54353 - DNA, 20 bp, Neisseria gonorrhoeae
tggcattgctgccgatgcgg

SEQ ID NO: 54354 - DNA, 20 bp, Neisseria gonorrhoeae
ggcattgctgccgatgcgga

SEQ ID NO: 54355 - DNA, 20 bp, Neisseria gonorrhoeae
gcattgctgccgatgcggat

SEQ ID NO: 54356 - DNA, 20 bp, Neisseria gonorrhoeae
ttacctgctccagctctttg

SEQ ID NO: 54357 - DNA, 20 bp, Neisseria gonorrhoeae
cctgctccagctctttgccg

SEQ ID NO: 54358 - DNA, 20 bp, Neisseria gonorrhoeae
gccgccgcaggttatctgtg

SEQ ID NO: 54359 - DNA, 20 bp, Neisseria gonorrhoeae
ccgccgcaggttatctgtgg

SEQ ID NO: 54360 - DNA, 20 bp, Neisseria gonorrhoeae
tctgtggacaggcgcggcga

SEQ ID NO: 54361 - DNA, 20 bp, Neisseria gonorrhoeae
tcgggatgttgattcgagga

SEQ ID NO: 54362 - DNA, 20 bp, Neisseria gonorrhoeae
attcgaggaaaacttgcgca

SEQ ID NO: 54363 - DNA, 20 bp, Neisseria gonorrhoeae
gaggaaaacttgcgcacgtt

SEQ ID NO: 54364 - DNA, 20 bp, Neisseria gonorrhoeae
cgcacgttcgcgttcggcaa

SEQ ID NO: 54365 - DNA, 20 bp, Neisseria gonorrhoeae
gcgttcggcaaggcgcacca

SEQ ID NO: 54366 - DNA, 20 bp, Neisseria gonorrhoeae
tccacccgctttaaaagctg

SEQ ID NO: 54367 - DNA, 20 bp, Neisseria gonorrhoeae
ccacccgctttaaaagctgc

SEQ ID NO: 54368 - DNA, 20 bp, Neisseria gonorrhoeae
cacccgctttaaaagctgcg

SEQ ID NO: 54369 - DNA, 20 bp, Neisseria gonorrhoeae
taaagcgggtggaaaaccgt

SEQ ID NO: 54370 - DNA, 20 bp, Neisseria gonorrhoeae
aaagcgggtggaaaaccgtt

SEQ ID NO: 54371 - DNA, 20 bp, Neisseria gonorrhoeae
ctccgccgttcatcagggcg

SEQ ID NO: 54372 - DNA, 20 bp, Neisseria gonorrhoeae
tccgccgttcatcagggcgc

SEQ ID NO: 54373 - DNA, 20 bp, Neisseria gonorrhoeae
atcagggcgcgggcgatgga

SEQ ID NO: 54374 - DNA, 20 bp, Neisseria gonorrhoeae
gccgggcttgttgccctctt

SEQ ID NO: 54375 - DNA, 20 bp, Neisseria gonorrhoeae
cgccatttccaacgcctgct

SEQ ID NO: 54376 - DNA, 20 bp, Neisseria gonorrhoeae
ccaacgcctgcttgatgtct

SEQ ID NO: 54377 - DNA, 20 bp, Neisseria gonorrhoeae
caacgcctgcttgatgtcta

SEQ ID NO: 54378 - DNA, 20 bp, Neisseria gonorrhoeae
atgtctacggcgacgacgcg

SEQ ID NO: 54379 - DNA, 20 bp, Neisseria gonorrhoeae
ttcctgcatggttacgccga

SEQ ID NO: 54380 - DNA, 20 bp, Neisseria gonorrhoeae
gcatcgtccagcggggcatc

SEQ ID NO: 54381 - DNA, 20 bp, Neisseria gonorrhoeae
gtccagaaggcagaaggggg

SEQ ID NO: 54382 - DNA, 20 bp, Neisseria gonorrhoeae
aggctgaacagggcgaacac

SEQ ID NO: 54383 - DNA, 20 bp, Neisseria gonorrhoeae
gccctgttcagcctcaaccc

SEQ ID NO: 54384 - DNA, 20 bp, Neisseria gonorrhoeae
agcctcaaccccgccccctt

SEQ ID NO: 54385 - DNA, 20 bp, Neisseria gonorrhoeae
ggtcaggttttgatggtagc

SEQ ID NO: 54386 - DNA, 20 bp, Neisseria gonorrhoeae
tgatggtagcgtttggcgtt

SEQ ID NO: 54387 - DNA, 20 bp, Neisseria gonorrhoeae
gatggtagcgtttggcgttg

SEQ ID NO: 54388 - DNA, 20 bp, Neisseria gonorrhoeae
atggtagcgtttggcgttga

SEQ ID NO: 54389 - DNA, 20 bp, Neisseria gonorrhoeae
ggcgttgatcagggcctcct

SEQ ID NO: 54390 - DNA, 20 bp, Neisseria gonorrhoeae
caacacggtctgctcttccg

SEQ ID NO: 54391 - DNA, 20 bp, Neisseria gonorrhoeae
cgccaactgtgccagttcgc

SEQ ID NO: 54392 - DNA, 20 bp, Neisseria gonorrhoeae
gcgctcgatgtgttcgcggc

SEQ ID NO: 54393 - DNA, 20 bp, Neisseria gonorrhoeae
gcggcggatttgcccttggt

SEQ ID NO: 54394 - DNA, 20 bp, Neisseria gonorrhoeae
gcggaagagcagaccgtgtt

SEQ ID NO: 54395 - DNA, 20 bp, Neisseria gonorrhoeae
tttgatgccgccggagaggc

SEQ ID NO: 54396 - DNA, 20 bp, Neisseria gonorrhoeae
ttgatgccgccggagaggcc

SEQ ID NO: 54397 - DNA, 20 bp, Neisseria gonorrhoeae
tgatgccgccggagaggccg

SEQ ID NO: 54398 - DNA, 20 bp, Neisseria gonorrhoeae
gatgccgccggagaggccgt

SEQ ID NO: 54399 - DNA, 20 bp, Neisseria gonorrhoeae
atgccgccggagaggccgtc

SEQ ID NO: 54400 - DNA, 20 bp, Neisseria gonorrhoeae
cctgccaaaagtcggcggct

SEQ ID NO: 54401 - DNA, 20 bp, Neisseria gonorrhoeae
ctgctgttgcgacaggattt

SEQ ID NO: 54402 - DNA, 20 bp, Neisseria gonorrhoeae
cgacaggatttgcgacaacg

SEQ ID NO: 54403 - DNA, 20 bp, Neisseria gonorrhoeae
gcgacaacgcctgctgctgc

SEQ ID NO: 54404 - DNA, 20 bp, Neisseria gonorrhoeae
cgacaacgcctgctgctgcg

SEQ ID NO: 54405 - DNA, 20 bp, Neisseria gonorrhoeae
aacgccagttcgcggcggat

SEQ ID NO: 54406 - DNA, 20 bp, Neisseria gonorrhoeae
gcggcggatgcggtttgcct

SEQ ID NO: 54407 - DNA, 20 bp, Neisseria gonorrhoeae
gcctcgtcctgctgggtttg

SEQ ID NO: 54408 - DNA, 20 bp, Neisseria gonorrhoeae
cctcgtcctgctgggtttgg

SEQ ID NO: 54409 - DNA, 20 bp, Neisseria gonorrhoeae
ggaaggcagcgttgagcgtg

SEQ ID NO: 54410 - DNA, 20 bp, Neisseria gonorrhoeae
cttaatgtggcgggcagttt

SEQ ID NO: 54411 - DNA, 20 bp, Neisseria gonorrhoeae
atgtggcgggcagttttgcc

SEQ ID NO: 54412 - DNA, 20 bp, Neisseria gonorrhoeae
tgccggaccggaccgggctt

SEQ ID NO: 54413 - DNA, 20 bp, Neisseria gonorrhoeae
gccggaccggaccgggcttt

SEQ ID NO: 54414 - DNA, 20 bp, Neisseria gonorrhoeae
ccggaccggaccgggctttc

SEQ ID NO: 54415 - DNA, 20 bp, Neisseria gonorrhoeae
ggtccgattcagcagcaaat

SEQ ID NO: 54416 - DNA, 20 bp, Neisseria gonorrhoeae
agcagcaaatcgcccttgat

SEQ ID NO: 54417 - DNA, 20 bp, Neisseria gonorrhoeae
ataccggcctgtccgtgacc

SEQ ID NO: 54418 - DNA, 20 bp, Neisseria gonorrhoeae
tggcgttgcagtccgtcggc

SEQ ID NO: 54419 - DNA, 20 bp, Neisseria gonorrhoeae
gctgctgaatcggaccgaag

SEQ ID NO: 54420 - DNA, 20 bp, Neisseria gonorrhoeae
tgctacctcgacagccaagt

SEQ ID NO: 54421 - DNA, 20 bp, Neisseria gonorrhoeae
gtacagcttatcgcctccgg

SEQ ID NO: 54422 - DNA, 20 bp, Neisseria gonorrhoeae
tcgcctccggctacggcgaa

SEQ ID NO: 54423 - DNA, 20 bp, Neisseria gonorrhoeae
cggaaaatgtattcgccgta

SEQ ID NO: 54424 - DNA, 20 bp, Neisseria gonorrhoeae
gccgtagccggaggcgataa

SEQ ID NO: 54425 - DNA, 20 bp, Neisseria gonorrhoeae
agcaggaacaaaacggcaaa

SEQ ID NO: 54426 - DNA, 20 bp, Neisseria gonorrhoeae
ataccggcggtaagcctgtg

SEQ ID NO: 54427 - DNA, 20 bp, Neisseria gonorrhoeae
ccgccggtatgaacgccctt

SEQ ID NO: 54428 - DNA, 20 bp, Neisseria gonorrhoeae
ccattgtcggcctgctctac

SEQ ID NO: 54429 - DNA, 20 bp, Neisseria gonorrhoeae
tcggcctgctctacctggcc

SEQ ID NO: 54430 - DNA, 20 bp, Neisseria gonorrhoeae
ccggcagcggcattgagctg

SEQ ID NO: 54431 - DNA, 20 bp, Neisseria gonorrhoeae
cggcagcggcattgagctgc

SEQ ID NO: 54432 - DNA, 20 bp, Neisseria gonorrhoeae
agctgcaaaaaagcgggcaa

SEQ ID NO: 54433 - DNA, 20 bp, Neisseria gonorrhoeae
tcgggcaggtttgccgcgag

SEQ ID NO: 54434 - DNA, 20 bp, Neisseria gonorrhoeae
cgggcaggtttgccgcgagc

SEQ ID NO: 54435 - DNA, 20 bp, Neisseria gonorrhoeae
tcaaagcccatatcgcgctt

SEQ ID NO: 54436 - DNA, 20 bp, Neisseria gonorrhoeae
ccgaagccgtgttccccgaa

SEQ ID NO: 54437 - DNA, 20 bp, Neisseria gonorrhoeae
cccgaaaacatcccctcgcc

SEQ ID NO: 54438 - DNA, 20 bp, Neisseria gonorrhoeae
acgcgatttgccgcaaaccc

SEQ ID NO: 54439 - DNA, 20 bp, Neisseria gonorrhoeae
gccgcaaacccctgtggcag

SEQ ID NO: 54440 - DNA, 20 bp, Neisseria gonorrhoeae
ggcgtggtagcggttgaccc

SEQ ID NO: 54441 - DNA, 20 bp, Neisseria gonorrhoeae
acccattcgatttcgccgtc

SEQ ID NO: 54442 - DNA, 20 bp, Neisseria gonorrhoeae
gatttcgccgtcggtcatca

SEQ ID NO: 54443 - DNA, 20 bp, Neisseria gonorrhoeae
cgccgtcggtcatcagggcg

SEQ ID NO: 54444 - DNA, 20 bp, Neisseria gonorrhoeae
gccgtcggtcatcagggcgg

SEQ ID NO: 54445 - DNA, 20 bp, Neisseria gonorrhoeae
ggcgtgatgtcgaaaccgac

SEQ ID NO: 54446 - DNA, 20 bp, Neisseria gonorrhoeae
ctttcttgatgggcgtcttg

SEQ ID NO: 54447 - DNA, 20 bp, Neisseria gonorrhoeae
cttgatgggcgtcttgcgta

SEQ ID NO: 54448 - DNA, 20 bp, Neisseria gonorrhoeae
ttgatgggcgtcttgcgtat

SEQ ID NO: 54449 - DNA, 20 bp, Neisseria gonorrhoeae
atgggcgtcttgcgtatttt

SEQ ID NO: 54450 - DNA, 20 bp, Neisseria gonorrhoeae
gatgccctgttcggcaatca

SEQ ID NO: 54451 - DNA, 20 bp, Neisseria gonorrhoeae
atgccctgttcggcaatcac

SEQ ID NO: 54452 - DNA, 20 bp, Neisseria gonorrhoeae
ggcaatcacgtccacgccgt

SEQ ID NO: 54453 - DNA, 20 bp, Neisseria gonorrhoeae
cgatgccttcttcccattcc

SEQ ID NO: 54454 - DNA, 20 bp, Neisseria gonorrhoeae
ttcccattccgcgacggcgt

SEQ ID NO: 54455 - DNA, 20 bp, Neisseria gonorrhoeae
gagttcaaagcggttggcac

SEQ ID NO: 54456 - DNA, 20 bp, Neisseria gonorrhoeae
agttcaaagcggttggcacc

SEQ ID NO: 54457 - DNA, 20 bp, Neisseria gonorrhoeae
aaagcggttggcacctgctt

SEQ ID NO: 54458 - DNA, 20 bp, Neisseria gonorrhoeae
gcacctgctttgagcggcac

SEQ ID NO: 54459 - DNA, 20 bp, Neisseria gonorrhoeae
gagcggcacttccaatacgc

SEQ ID NO: 54460 - DNA, 20 bp, Neisseria gonorrhoeae
gtaggcggtcaaggtatcgg

SEQ ID NO: 54461 - DNA, 20 bp, Neisseria gonorrhoeae
taggcggtcaaggtatcggc

SEQ ID NO: 54462 - DNA, 20 bp, Neisseria gonorrhoeae
cagccgataccttgaccgcc

SEQ ID NO: 54463 - DNA, 20 bp, Neisseria gonorrhoeae
accgcctacaaactcgccta

SEQ ID NO: 54464 - DNA, 20 bp, Neisseria gonorrhoeae
ccagtttttcgcggcggaac

SEQ ID NO: 54465 - DNA, 20 bp, Neisseria gonorrhoeae
cagtttttcgcggcggaacg

SEQ ID NO: 54466 - DNA, 20 bp, Neisseria gonorrhoeae
ttcgcggcggaacgcaccat

SEQ ID NO: 54467 - DNA, 20 bp, Neisseria gonorrhoeae
tcgcggcggaacgcaccatg

SEQ ID NO: 54468 - DNA, 20 bp, Neisseria gonorrhoeae
cgcggcggaacgcaccatgg

SEQ ID NO: 54469 - DNA, 20 bp, Neisseria gonorrhoeae
caatacgaacacaatggcgg

SEQ ID NO: 54470 - DNA, 20 bp, Neisseria gonorrhoeae
tgagcgatacgccgagaaac

SEQ ID NO: 54471 - DNA, 20 bp, Neisseria gonorrhoeae
gagcgatacgccgagaaaca

SEQ ID NO: 54472 - DNA, 20 bp, Neisseria gonorrhoeae
agcgatacgccgagaaacac

SEQ ID NO: 54473 - DNA, 20 bp, Neisseria gonorrhoeae
ctcggcgtatcgctcaaaat

SEQ ID NO: 54474 - DNA, 20 bp, Neisseria gonorrhoeae
gaggataaacagcgtggagg

SEQ ID NO: 54475 - DNA, 20 bp, Neisseria gonorrhoeae
atcctcgaagcgatgttggg

SEQ ID NO: 54476 - DNA, 20 bp, Neisseria gonorrhoeae
tcctcgaagcgatgttgggc

SEQ ID NO: 54477 - DNA, 20 bp, Neisseria gonorrhoeae
ggcgtgtggacgcagcaggc

SEQ ID NO: 54478 - DNA, 20 bp, Neisseria gonorrhoeae
ccgccgcattgctgacttcc

SEQ ID NO: 54479 - DNA, 20 bp, Neisseria gonorrhoeae
atacaggcatcggcggcggc

SEQ ID NO: 54480 - DNA, 20 bp, Neisseria gonorrhoeae
cggtttggcgcggtaagcca

SEQ ID NO: 54481 - DNA, 20 bp, Neisseria gonorrhoeae
ggtttggcgcggtaagccac

SEQ ID NO: 54482 - DNA, 20 bp, Neisseria gonorrhoeae
ggcgcggtaagccacgccta

SEQ ID NO: 54483 - DNA, 20 bp, Neisseria gonorrhoeae
gcgcggtaagccacgcctat

SEQ ID NO: 54484 - DNA, 20 bp, Neisseria gonorrhoeae
caacgcattgggcagacaag

SEQ ID NO: 54485 - DNA, 20 bp, Neisseria gonorrhoeae
ggcagacaagccatgatttt

SEQ ID NO: 54486 - DNA, 20 bp, Neisseria gonorrhoeae
ttggtgtgcctgttgtcggt

SEQ ID NO: 54487 - DNA, 20 bp, Neisseria gonorrhoeae
tggtgtgcctgttgtcggtt

SEQ ID NO: 54488 - DNA, 20 bp, Neisseria gonorrhoeae
ggtgtgcctgttgtcggttt

SEQ ID NO: 54489 - DNA, 20 bp, Neisseria gonorrhoeae
aactatgctgtctaaattta

SEQ ID NO: 54490 - DNA, 20 bp, Neisseria gonorrhoeae
actatgctgtctaaatttac

SEQ ID NO: 54491 - DNA, 20 bp, Neisseria gonorrhoeae
acggcagataatcagcagcg

SEQ ID NO: 54492 - DNA, 20 bp, Neisseria gonorrhoeae
cggcagataatcagcagcgt

SEQ ID NO: 54493 - DNA, 20 bp, Neisseria gonorrhoeae
gaacacgattgaccgcttga

SEQ ID NO: 54494 - DNA, 20 bp, Neisseria gonorrhoeae
tgcgtttgatttgaaatcta

SEQ ID NO: 54495 - DNA, 20 bp, Neisseria gonorrhoeae
gatttgaaatctaccaatgg

SEQ ID NO: 54496 - DNA, 20 bp, Neisseria gonorrhoeae
atttgaaatctaccaatggc

SEQ ID NO: 54497 - DNA, 20 bp, Neisseria gonorrhoeae
gaaatctaccaatggcacac

SEQ ID NO: 54498 - DNA, 20 bp, Neisseria gonorrhoeae
aaatctaccaatggcacacc

SEQ ID NO: 54499 - DNA, 20 bp, Neisseria gonorrhoeae
ggagaagacggttttgaatt

SEQ ID NO: 54500 - DNA, 20 bp, Neisseria gonorrhoeae
tgaattgtgggacgaatggt

SEQ ID NO: 54501 - DNA, 20 bp, Neisseria gonorrhoeae
gaattgtgggacgaatggtc

SEQ ID NO: 54502 - DNA, 20 bp, Neisseria gonorrhoeae
aattgtgggacgaatggtcg

SEQ ID NO: 54503 - DNA, 20 bp, Neisseria gonorrhoeae
tgggacgaatggtcgcgcca

SEQ ID NO: 54504 - DNA, 20 bp, Neisseria gonorrhoeae
aatacggtggtttccaacgt

SEQ ID NO: 54505 - DNA, 20 bp, Neisseria gonorrhoeae
ccaacgtgaaattaagcaac

SEQ ID NO: 54506 - DNA, 20 bp, Neisseria gonorrhoeae
caacgtgaaattaagcaacc

SEQ ID NO: 54507 - DNA, 20 bp, Neisseria gonorrhoeae
agcaacctgaaaaacagcct

SEQ ID NO: 54508 - DNA, 20 bp, Neisseria gonorrhoeae
aggctcttctacatcgggtt

SEQ ID NO: 54509 - DNA, 20 bp, Neisseria gonorrhoeae
tcggctgctgacaagctcaa

SEQ ID NO: 54510 - DNA, 20 bp, Neisseria gonorrhoeae
atttggcgttcatcgggcat

SEQ ID NO: 54511 - DNA, 20 bp, Neisseria gonorrhoeae
ggcgttcatcgggcatctcg

SEQ ID NO: 54512 - DNA, 20 bp, Neisseria gonorrhoeae
gcgttcatcgggcatctcgc

SEQ ID NO: 54513 - DNA, 20 bp, Neisseria gonorrhoeae
atcgggcatctcgctttgtg

SEQ ID NO: 54514 - DNA, 20 bp, Neisseria gonorrhoeae
tgtcggtgtttggcaacgtg

SEQ ID NO: 54515 - DNA, 20 bp, Neisseria gonorrhoeae
ggcaacgtgatgatgctaaa

SEQ ID NO: 54516 - DNA, 20 bp, Neisseria gonorrhoeae
gcaacgtgatgatgctaaat

SEQ ID NO: 54517 - DNA, 20 bp, Neisseria gonorrhoeae
ttgcaatttgtagaaatcaa

SEQ ID NO: 54518 - DNA, 20 bp, Neisseria gonorrhoeae
tgcaatttgtagaaatcaaa

SEQ ID NO: 54519 - DNA, 20 bp, Neisseria gonorrhoeae
atcataatcggcggcatctg

SEQ ID NO: 54520 - DNA, 20 bp, Neisseria gonorrhoeae
tgtttgaaaactcgtaaaca

SEQ ID NO: 54521 - DNA, 20 bp, Neisseria gonorrhoeae
gtttgaaaactcgtaaacaa

SEQ ID NO: 54522 - DNA, 20 bp, Neisseria gonorrhoeae
tttgaaaactcgtaaacaag

SEQ ID NO: 54523 - DNA, 20 bp, Neisseria gonorrhoeae
gaaaactcgtaaacaagcgg

SEQ ID NO: 54524 - DNA, 20 bp, Neisseria gonorrhoeae
ttgcaaaatctgtttgtggc

SEQ ID NO: 54525 - DNA, 20 bp, Neisseria gonorrhoeae
caaaatctgtttgtggcagg

SEQ ID NO: 54526 - DNA, 20 bp, Neisseria gonorrhoeae
gtggcagggcagttggcgga

SEQ ID NO: 54527 - DNA, 20 bp, Neisseria gonorrhoeae
tggcagggcagttggcggaa

SEQ ID NO: 54528 - DNA, 20 bp, Neisseria gonorrhoeae
gcggaagcgatgcacaatct

SEQ ID NO: 54529 - DNA, 20 bp, Neisseria gonorrhoeae
tcgcgtgaaatgtttgaagc

SEQ ID NO: 54530 - DNA, 20 bp, Neisseria gonorrhoeae
cgcgtgaaatgtttgaagca

SEQ ID NO: 54531 - DNA, 20 bp, Neisseria gonorrhoeae
gcgtgaaatgtttgaagcat

SEQ ID NO: 54532 - DNA, 20 bp, Neisseria gonorrhoeae
gaagcattggacaatattcc

SEQ ID NO: 54533 - DNA, 20 bp, Neisseria gonorrhoeae
aagcattggacaatattcca

SEQ ID NO: 54534 - DNA, 20 bp, Neisseria gonorrhoeae
agccttttcgcgccattgcg

SEQ ID NO: 54535 - DNA, 20 bp, Neisseria gonorrhoeae
gccttttcgcgccattgcga

SEQ ID NO: 54536 - DNA, 20 bp, Neisseria gonorrhoeae
tcgcgccattgcgagttatc

SEQ ID NO: 54537 - DNA, 20 bp, Neisseria gonorrhoeae
cgcgccattgcgagttatcg

SEQ ID NO: 54538 - DNA, 20 bp, Neisseria gonorrhoeae
gcgccattgcgagttatcgg

SEQ ID NO: 54539 - DNA, 20 bp, Neisseria gonorrhoeae
caaatgcgcgattagattaa

SEQ ID NO: 54540 - DNA, 20 bp, Neisseria gonorrhoeae
gattaatcgtcattttttgt

SEQ ID NO: 54541 - DNA, 20 bp, Neisseria gonorrhoeae
atcgtcattttttgttggat

SEQ ID NO: 54542 - DNA, 20 bp, Neisseria gonorrhoeae
tttgttggattaaggcgtgc

SEQ ID NO: 54543 - DNA, 20 bp, Neisseria gonorrhoeae
ttgttggattaaggcgtgcc

SEQ ID NO: 54544 - DNA, 20 bp, Neisseria gonorrhoeae
gcgtgatagccgctgttgaa

SEQ ID NO: 54545 - DNA, 20 bp, Neisseria gonorrhoeae
aacaataacgcgctttcccg

SEQ ID NO: 54546 - DNA, 20 bp, Neisseria gonorrhoeae
cccgttggaaacgttgtgcg

SEQ ID NO: 54547 - DNA, 20 bp, Neisseria gonorrhoeae
ccgttggaaacgttgtgcga

SEQ ID NO: 54548 - DNA, 20 bp, Neisseria gonorrhoeae
gaaacgttgtgcgacaagct

SEQ ID NO: 54549 - DNA, 20 bp, Neisseria gonorrhoeae
ccgataatggcggcaatcac

SEQ ID NO: 54550 - DNA, 20 bp, Neisseria gonorrhoeae
accccgtcgggtacgggcag

SEQ ID NO: 54551 - DNA, 20 bp, Neisseria gonorrhoeae
gacgctgctggctatgtttg

SEQ ID NO: 54552 - DNA, 20 bp, Neisseria gonorrhoeae
gtcggtgtgattgccgccat

SEQ ID NO: 54553 - DNA, 20 bp, Neisseria gonorrhoeae
tcggtgtgattgccgccatt

SEQ ID NO: 54554 - DNA, 20 bp, Neisseria gonorrhoeae
cgctgcatcacagggcggcg

SEQ ID NO: 54555 - DNA, 20 bp, Neisseria gonorrhoeae
gtcaggcgcacgttttcgct

SEQ ID NO: 54556 - DNA, 20 bp, Neisseria gonorrhoeae
tcgctgatgttttcgtcgtc

SEQ ID NO: 54557 - DNA, 20 bp, Neisseria gonorrhoeae
cgctgatgttttcgtcgtcg

SEQ ID NO: 54558 - DNA, 20 bp, Neisseria gonorrhoeae
gctgatgttttcgtcgtcga

SEQ ID NO: 54559 - DNA, 20 bp, Neisseria gonorrhoeae
ttgccgttggctgacacttc

SEQ ID NO: 54560 - DNA, 20 bp, Neisseria gonorrhoeae
ccgttggctgacacttcgtc

SEQ ID NO: 54561 - DNA, 20 bp, Neisseria gonorrhoeae
gctgacacttcgtcaataac

SEQ ID NO: 54562 - DNA, 20 bp, Neisseria gonorrhoeae
gtcaataaccgatttctgtc

SEQ ID NO: 54563 - DNA, 20 bp, Neisseria gonorrhoeae
ctgtcgcccaggtaagtctt

SEQ ID NO: 54564 - DNA, 20 bp, Neisseria gonorrhoeae
accccgcctgccgacatcac

SEQ ID NO: 54565 - DNA, 20 bp, Neisseria gonorrhoeae
ccccgcctgccgacatcacc

SEQ ID NO: 54566 - DNA, 20 bp, Neisseria gonorrhoeae
acacacggcggcggcggcag

SEQ ID NO: 54567 - DNA, 20 bp, Neisseria gonorrhoeae
tctgccgccgccgccgtgtg

SEQ ID NO: 54568 - DNA, 20 bp, Neisseria gonorrhoeae
ctgccgccgccgccgtgtgt

SEQ ID NO: 54569 - DNA, 20 bp, Neisseria gonorrhoeae
gccctgagccccatcgcatc

SEQ ID NO: 54570 - DNA, 20 bp, Neisseria gonorrhoeae
ccaaaacggtacgcgccccg

SEQ ID NO: 54571 - DNA, 20 bp, Neisseria gonorrhoeae
accgccgcacggatatggcc

SEQ ID NO: 54572 - DNA, 20 bp, Neisseria gonorrhoeae
ccgccgcacggatatggccg

SEQ ID NO: 54573 - DNA, 20 bp, Neisseria gonorrhoeae
tggcaacggcggatgcgatg

SEQ ID NO: 54574 - DNA, 20 bp, Neisseria gonorrhoeae
gtctccatccacgccgacgc

SEQ ID NO: 54575 - DNA, 20 bp, Neisseria gonorrhoeae
caccagcccctccgcgcgcg

SEQ ID NO: 54576 - DNA, 20 bp, Neisseria gonorrhoeae
accagcccctccgcgcgcgg

SEQ ID NO: 54577 - DNA, 20 bp, Neisseria gonorrhoeae
agcatataaacccccgttcc

SEQ ID NO: 54578 - DNA, 20 bp, Neisseria gonorrhoeae
cgcgcgcggaggggctggtg

SEQ ID NO: 54579 - DNA, 20 bp, Neisseria gonorrhoeae
ctgtccaatcctgccgaaga

SEQ ID NO: 54580 - DNA, 20 bp, Neisseria gonorrhoeae
cgtcggcagtgcgcccaatc

SEQ ID NO: 54581 - DNA, 20 bp, Neisseria gonorrhoeae
ggcgcactgccgacggaagg

SEQ ID NO: 54582 - DNA, 20 bp, Neisseria gonorrhoeae
gctgcccagcagcttctctt

SEQ ID NO: 54583 - DNA, 20 bp, Neisseria gonorrhoeae
tcttcggcaggattggacag

SEQ ID NO: 54584 - DNA, 20 bp, Neisseria gonorrhoeae
cagggcttggaagtcggttt

SEQ ID NO: 54585 - DNA, 20 bp, Neisseria gonorrhoeae
gaagtcggtttcgcccgcct

SEQ ID NO: 54586 - DNA, 20 bp, Neisseria gonorrhoeae
cgcccgcctcgaccttgccg

SEQ ID NO: 54587 - DNA, 20 bp, Neisseria gonorrhoeae
gcccgcctcgaccttgccgc

SEQ ID NO: 54588 - DNA, 20 bp, Neisseria gonorrhoeae
ccgccggcaaattcccaata

SEQ ID NO: 54589 - DNA, 20 bp, Neisseria gonorrhoeae
ggacagggcggggccgtaga

SEQ ID NO: 54590 - DNA, 20 bp, Neisseria gonorrhoeae
gggcttgcccaatgcgtcgt

SEQ ID NO: 54591 - DNA, 20 bp, Neisseria gonorrhoeae
cccaatgcgtcgtgcccgat

SEQ ID NO: 54592 - DNA, 20 bp, Neisseria gonorrhoeae
cggaaggaaaccgcgcctcg

SEQ ID NO: 54593 - DNA, 20 bp, Neisseria gonorrhoeae
ccttccgcaacatcggcatc

SEQ ID NO: 54594 - DNA, 20 bp, Neisseria gonorrhoeae
tgcagacgctcgaactgcct

SEQ ID NO: 54595 - DNA, 20 bp, Neisseria gonorrhoeae
gcagacgctcgaactgcctg

SEQ ID NO: 54596 - DNA, 20 bp, Neisseria gonorrhoeae
cagacgctcgaactgcctga

SEQ ID NO: 54597 - DNA, 20 bp, Neisseria gonorrhoeae
gttcggcgtggctgtgtgcg

SEQ ID NO: 54598 - DNA, 20 bp, Neisseria gonorrhoeae
ttcggcgtggctgtgtgcgt

SEQ ID NO: 54599 - DNA, 20 bp, Neisseria gonorrhoeae
ggcgcggtgcagggttttga

SEQ ID NO: 54600 - DNA, 20 bp, Neisseria gonorrhoeae
tgagttcctgactgccgtac

SEQ ID NO: 54601 - DNA, 20 bp, Neisseria gonorrhoeae
gagttcctgactgccgtacc

SEQ ID NO: 54602 - DNA, 20 bp, Neisseria gonorrhoeae
agttcctgactgccgtacca

SEQ ID NO: 54603 - DNA, 20 bp, Neisseria gonorrhoeae
ctgactgccgtaccacgaca

SEQ ID NO: 54604 - DNA, 20 bp, Neisseria gonorrhoeae
tatgcgcggcgtgtccgaaa

SEQ ID NO: 54605 - DNA, 20 bp, Neisseria gonorrhoeae
attgccgcctgttgggtaaa

SEQ ID NO: 54606 - DNA, 20 bp, Neisseria gonorrhoeae
ccgcctgttgggtaaacgtg

SEQ ID NO: 54607 - DNA, 20 bp, Neisseria gonorrhoeae
ggtaaacgtgccctgcggcc

SEQ ID NO: 54608 - DNA, 20 bp, Neisseria gonorrhoeae
acccaacaggcggcaatcaa

SEQ ID NO: 54609 - DNA, 20 bp, Neisseria gonorrhoeae
ccgccaacccgtcccaactc

SEQ ID NO: 54610 - DNA, 20 bp, Neisseria gonorrhoeae
ttcgggttgcccccgttttg

SEQ ID NO: 54611 - DNA, 20 bp, Neisseria gonorrhoeae
tcgggttgcccccgttttgg

SEQ ID NO: 54612 - DNA, 20 bp, Neisseria gonorrhoeae
cgggttgcccccgttttggc

SEQ ID NO: 54613 - DNA, 20 bp, Neisseria gonorrhoeae
gggttgcccccgttttggct

SEQ ID NO: 54614 - DNA, 20 bp, Neisseria gonorrhoeae
gcgtcggacgcatagcggca

SEQ ID NO: 54615 - DNA, 20 bp, Neisseria gonorrhoeae
cgtcggacgcatagcggcac

SEQ ID NO: 54616 - DNA, 20 bp, Neisseria gonorrhoeae
tgtgccgctatgcgtccgac

SEQ ID NO: 54617 - DNA, 20 bp, Neisseria gonorrhoeae
gtgccgctatgcgtccgacg

SEQ ID NO: 54618 - DNA, 20 bp, Neisseria gonorrhoeae
tgccgctatgcgtccgacgc

SEQ ID NO: 54619 - DNA, 20 bp, Neisseria gonorrhoeae
atcctcctcacgaaaatacg

SEQ ID NO: 54620 - DNA, 20 bp, Neisseria gonorrhoeae
tcctcctcacgaaaatacgc

SEQ ID NO: 54621 - DNA, 20 bp, Neisseria gonorrhoeae
ctttcttgatgggcgtcttg

SEQ ID NO: 54622 - DNA, 20 bp, Neisseria gonorrhoeae
cttgatgggcgtcttgcgta

SEQ ID NO: 54623 - DNA, 20 bp, Neisseria gonorrhoeae
ttgatgggcgtcttgcgtat

SEQ ID NO: 54624 - DNA, 20 bp, Neisseria gonorrhoeae
ggcgtgcgctaccgcttctg

SEQ ID NO: 54625 - DNA, 20 bp, Neisseria gonorrhoeae
tgattccccgacaccgatgc

SEQ ID NO: 54626 - DNA, 20 bp, Neisseria gonorrhoeae
cccgacaccgatgccgtctg

SEQ ID NO: 54627 - DNA, 20 bp, Neisseria gonorrhoeae
agacggcatttttaatcgcc

SEQ ID NO: 54628 - DNA, 20 bp, Neisseria gonorrhoeae
ttaatcgcccgccgtttacg

SEQ ID NO: 54629 - DNA, 20 bp, Neisseria gonorrhoeae
tcggataaaacggttgccca

SEQ ID NO: 54630 - DNA, 20 bp, Neisseria gonorrhoeae
cccaaaccccgcgtcctaga

SEQ ID NO: 54631 - DNA, 20 bp, Neisseria gonorrhoeae
ccacttccgtgggaatgacg

SEQ ID NO: 54632 - DNA, 20 bp, Neisseria gonorrhoeae
cgtgggaatgacggttcggt

SEQ ID NO: 54633 - DNA, 20 bp, Neisseria gonorrhoeae
ggttgctacggcccgctgat

SEQ ID NO: 54634 - DNA, 20 bp, Neisseria gonorrhoeae
ccgccatcatcagccaaaac

SEQ ID NO: 54635 - DNA, 20 bp, Neisseria gonorrhoeae
gggcggcggataaatcgaat

SEQ ID NO: 54636 - DNA, 20 bp, Neisseria gonorrhoeae
ggcggcggataaatcgaatt

SEQ ID NO: 54637 - DNA, 20 bp, Neisseria gonorrhoeae
cccgtatgaccgagcgcggt

SEQ ID NO: 54638 - DNA, 20 bp, Neisseria gonorrhoeae
gatttatccgccgcccaaag

SEQ ID NO: 54639 - DNA, 20 bp, Neisseria gonorrhoeae
cgcaccagccgccgtcaatc

SEQ ID NO: 54640 - DNA, 20 bp, Neisseria gonorrhoeae
caaacgctcgcggatttcat

SEQ ID NO: 54641 - DNA, 20 bp, Neisseria gonorrhoeae
cataagggtcggtcaatggt

SEQ ID NO: 54642 - DNA, 20 bp, Neisseria gonorrhoeae
ataagggtcggtcaatggtt

SEQ ID NO: 54643 - DNA, 20 bp, Neisseria gonorrhoeae
accgacccttatgaaatccg

SEQ ID NO: 54644 - DNA, 20 bp, Neisseria gonorrhoeae
ggtggaacgaggtgtccatc

SEQ ID NO: 54645 - DNA, 20 bp, Neisseria gonorrhoeae
gtggaacgaggtgtccatca

SEQ ID NO: 54646 - DNA, 20 bp, Neisseria gonorrhoeae
ggcaggccgggaaagtgttc

SEQ ID NO: 54647 - DNA, 20 bp, Neisseria gonorrhoeae
ctgcgcggcgaggatgccgc

SEQ ID NO: 54648 - DNA, 20 bp, Neisseria gonorrhoeae
gcggggttgtgcagcggggc

SEQ ID NO: 54649 - DNA, 20 bp, Neisseria gonorrhoeae
tttacgcgttccgccgcctg

SEQ ID NO: 54650 - DNA, 20 bp, Neisseria gonorrhoeae
acgcgttccgccgcctgcgg

SEQ ID NO: 54651 - DNA, 20 bp, Neisseria gonorrhoeae
cgcgttccgccgcctgcggc

SEQ ID NO: 54652 - DNA, 20 bp, Neisseria gonorrhoeae
cgccgcctgcggcaaggttg

SEQ ID NO: 54653 - DNA, 20 bp, Neisseria gonorrhoeae
accagcgtaccgagcacggc

SEQ ID NO: 54654 - DNA, 20 bp, Neisseria gonorrhoeae
acggttttgccgctggaggc

SEQ ID NO: 54655 - DNA, 20 bp, Neisseria gonorrhoeae
cggttttgccgctggaggcg

SEQ ID NO: 54656 - DNA, 20 bp, Neisseria gonorrhoeae
tgccgctggaggcggtgtaa

SEQ ID NO: 54657 - DNA, 20 bp, Neisseria gonorrhoeae
gccgctggaggcggtgtaat

SEQ ID NO: 54658 - DNA, 20 bp, Neisseria gonorrhoeae
ccgctggaggcggtgtaatc

SEQ ID NO: 54659 - DNA, 20 bp, Neisseria gonorrhoeae
tcgggcaaaatcgccggcgg

SEQ ID NO: 54660 - DNA, 20 bp, Neisseria gonorrhoeae
atgtacgttcccctgccagt

SEQ ID NO: 54661 - DNA, 20 bp, Neisseria gonorrhoeae
ccctgccagtgcgccttccc

SEQ ID NO: 54662 - DNA, 20 bp, Neisseria gonorrhoeae
ggaaggcgcactggcagggg

SEQ ID NO: 54663 - DNA, 20 bp, Neisseria gonorrhoeae
agaggtatgcgtccgccggc

SEQ ID NO: 54664 - DNA, 20 bp, Neisseria gonorrhoeae
ggccgtctgaaggctcttcg

SEQ ID NO: 54665 - DNA, 20 bp, Neisseria gonorrhoeae
gccgtctgaaggctcttcgt

SEQ ID NO: 54666 - DNA, 20 bp, Neisseria gonorrhoeae
gtaaggcttcgccagccctt

SEQ ID NO: 54667 - DNA, 20 bp, Neisseria gonorrhoeae
gccagccctttcgccgccaa

SEQ ID NO: 54668 - DNA, 20 bp, Neisseria gonorrhoeae
cgccgccaaatcggcggtgg

SEQ ID NO: 54669 - DNA, 20 bp, Neisseria gonorrhoeae
tcgcgccctcgccgaaaaat

SEQ ID NO: 54670 - DNA, 20 bp, Neisseria gonorrhoeae
gacaaacgccccgaccacgc

SEQ ID NO: 54671 - DNA, 20 bp, Neisseria gonorrhoeae
acgcaagaattcggtcagtg

SEQ ID NO: 54672 - DNA, 20 bp, Neisseria gonorrhoeae
cgcaagaattcggtcagtgc

SEQ ID NO: 54673 - DNA, 20 bp, Neisseria gonorrhoeae
gcactgaccgaattcttgcg

SEQ ID NO: 54674 - DNA, 20 bp, Neisseria gonorrhoeae
ccgcttccaaaccgcccacg

SEQ ID NO: 54675 - DNA, 20 bp, Neisseria gonorrhoeae
cgcttccaaaccgcccacgc

SEQ ID NO: 54676 - DNA, 20 bp, Neisseria gonorrhoeae
caaaccgcccacgccacgga

SEQ ID NO: 54677 - DNA, 20 bp, Neisseria gonorrhoeae
atgcgctgggcgtgatttcc

SEQ ID NO: 54678 - DNA, 20 bp, Neisseria gonorrhoeae
ccgtggcgtgggcggtttgg

SEQ ID NO: 54679 - DNA, 20 bp, Neisseria gonorrhoeae
cgctcggtcaggacgacctc

SEQ ID NO: 54680 - DNA, 20 bp, Neisseria gonorrhoeae
cgtcggtcatggtgcgccgc

SEQ ID NO: 54681 - DNA, 20 bp, Neisseria gonorrhoeae
tcccgatacggttgaggtcg

SEQ ID NO: 54682 - DNA, 20 bp, Neisseria gonorrhoeae
cccgatacggttgaggtcgt

SEQ ID NO: 54683 - DNA, 20 bp, Neisseria gonorrhoeae
ccgatacggttgaggtcgtc

SEQ ID NO: 54684 - DNA, 20 bp, Neisseria gonorrhoeae
ggcaacttgatgtcgccgta

SEQ ID NO: 54685 - DNA, 20 bp, Neisseria gonorrhoeae
gcaacttgatgtcgccgtat

SEQ ID NO: 54686 - DNA, 20 bp, Neisseria gonorrhoeae
atgtcgccgtatttttggaa

SEQ ID NO: 54687 - DNA, 20 bp, Neisseria gonorrhoeae
ttggaagcggcggccgacgc

SEQ ID NO: 54688 - DNA, 20 bp, Neisseria gonorrhoeae
tggaagcggcggccgacgcc

SEQ ID NO: 54689 - DNA, 20 bp, Neisseria gonorrhoeae
ctcaaactcgcacccaaacc

SEQ ID NO: 54690 - DNA, 20 bp, Neisseria gonorrhoeae
ccatcagagagtgggtaagc

SEQ ID NO: 54691 - DNA, 20 bp, Neisseria gonorrhoeae
cccactctctgatggcaatc

SEQ ID NO: 54692 - DNA, 20 bp, Neisseria gonorrhoeae
ggtatgggtttgggtgcgag

SEQ ID NO: 54693 - DNA, 20 bp, Neisseria gonorrhoeae
aagccgcagccgtccaaatc

SEQ ID NO: 54694 - DNA, 20 bp, Neisseria gonorrhoeae
gcggcgcatcgacgccgatc

SEQ ID NO: 54695 - DNA, 20 bp, Neisseria gonorrhoeae
cggcgcatcgacgccgatca

SEQ ID NO: 54696 - DNA, 20 bp, Neisseria gonorrhoeae
tgccttatctttcaacgcgt

SEQ ID NO: 54697 - DNA, 20 bp, Neisseria gonorrhoeae
gccttatctttcaacgcgtc

SEQ ID NO: 54698 - DNA, 20 bp, Neisseria gonorrhoeae
gatgtcgcctagcacgcgcc

SEQ ID NO: 54699 - DNA, 20 bp, Neisseria gonorrhoeae
tgcttgaacgcctcgatatc

SEQ ID NO: 54700 - DNA, 20 bp, Neisseria gonorrhoeae
gcttgaacgcctcgatatcc

SEQ ID NO: 54701 - DNA, 20 bp, Neisseria gonorrhoeae
cttgaacgcctcgatatccg

SEQ ID NO: 54702 - DNA, 20 bp, Neisseria gonorrhoeae
aacgcctcgatatccggctg

SEQ ID NO: 54703 - DNA, 20 bp, Neisseria gonorrhoeae
ttgacgaggtgggtttgcgg

SEQ ID NO: 54704 - DNA, 20 bp, Neisseria gonorrhoeae
tgacgaggtgggtttgcggg

SEQ ID NO: 54705 - DNA, 20 bp, Neisseria gonorrhoeae
gacgaggtgggtttgcgggc

SEQ ID NO: 54706 - DNA, 20 bp, Neisseria gonorrhoeae
acgaggtgggtttgcgggcc

SEQ ID NO: 54707 - DNA, 20 bp, Neisseria gonorrhoeae
gcgggccgtcggtacgcact

SEQ ID NO: 54708 - DNA, 20 bp, Neisseria gonorrhoeae
atgttgctgaagccttgcaa

SEQ ID NO: 54709 - DNA, 20 bp, Neisseria gonorrhoeae
ctgaagccttgcaaaccttc

SEQ ID NO: 54710 - DNA, 20 bp, Neisseria gonorrhoeae
caaaccttccgccacatcgt

SEQ ID NO: 54711 - DNA, 20 bp, Neisseria gonorrhoeae
cgccacatcgttcaaactca

SEQ ID NO: 54712 - DNA, 20 bp, Neisseria gonorrhoeae
aaactcaaaccggcagccaa

SEQ ID NO: 54713 - DNA, 20 bp, Neisseria gonorrhoeae
tccaaacgcgggttgtcgct

SEQ ID NO: 54714 - DNA, 20 bp, Neisseria gonorrhoeae
ccaaacgcgggttgtcgctg

SEQ ID NO: 54715 - DNA, 20 bp, Neisseria gonorrhoeae
caaacgcgggttgtcgctgg

SEQ ID NO: 54716 - DNA, 20 bp, Neisseria gonorrhoeae
tcgctggttacgacgacttt

SEQ ID NO: 54717 - DNA, 20 bp, Neisseria gonorrhoeae
cgacgactttatccgcgccc

SEQ ID NO: 54718 - DNA, 20 bp, Neisseria gonorrhoeae
catcgcggcggctgttgcgc

SEQ ID NO: 54719 - DNA, 20 bp, Neisseria gonorrhoeae
cgccttgttgacggaaacgg

SEQ ID NO: 54720 - DNA, 20 bp, Neisseria gonorrhoeae
ttgacggaaacggtagagca

SEQ ID NO: 54721 - DNA, 20 bp, Neisseria gonorrhoeae
acggaaacggtagagcaggg

SEQ ID NO: 54722 - DNA, 20 bp, Neisseria gonorrhoeae
ggacatcgacgggggcgggg

SEQ ID NO: 54723 - DNA, 20 bp, Neisseria gonorrhoeae
gatcatatcggttacggcac

SEQ ID NO: 54724 - DNA, 20 bp, Neisseria gonorrhoeae
cggcacggttgcgccgctgt

SEQ ID NO: 54725 - DNA, 20 bp, Neisseria gonorrhoeae
cgccgctgttcgctgtctgc

SEQ ID NO: 54726 - DNA, 20 bp, Neisseria gonorrhoeae
gctgtctgcccggccgggtc

SEQ ID NO: 54727 - DNA, 20 bp, Neisseria gonorrhoeae
ggatcgtaggcgggcgtatt

SEQ ID NO: 54728 - DNA, 20 bp, Neisseria gonorrhoeae
ctgacctttgccgtcaatat

SEQ ID NO: 54729 - DNA, 20 bp, Neisseria gonorrhoeae
gccgtcaatatcggtaaatc

SEQ ID NO: 54730 - DNA, 20 bp, Neisseria gonorrhoeae
ccgtcaatatcggtaaatcc

SEQ ID NO: 54731 - DNA, 20 bp, Neisseria gonorrhoeae
cccatcgggtaatggcgttt

SEQ ID NO: 54732 - DNA, 20 bp, Neisseria gonorrhoeae
taattctttttcaaatacaa

SEQ ID NO: 54733 - DNA, 20 bp, Neisseria gonorrhoeae
ctgtcgatgcttaattcgtg

SEQ ID NO: 54734 - DNA, 20 bp, Neisseria gonorrhoeae
attcgtgtgcgccgccgaac

SEQ ID NO: 54735 - DNA, 20 bp, Neisseria gonorrhoeae
gtgtgcgccgccgaacatga

SEQ ID NO: 54736 - DNA, 20 bp, Neisseria gonorrhoeae
tacccttgtgattttgattt

SEQ ID NO: 54737 - DNA, 20 bp, Neisseria gonorrhoeae
acccttgtgattttgatttc

SEQ ID NO: 54738 - DNA, 20 bp, Neisseria gonorrhoeae
ccgttccggctcgcccgcct

SEQ ID NO: 54739 - DNA, 20 bp, Neisseria gonorrhoeae
cggctcgcccgccttttctt

SEQ ID NO: 54740 - DNA, 20 bp, Neisseria gonorrhoeae
tcttcaacctcgtcggcttt

SEQ ID NO: 54741 - DNA, 20 bp, Neisseria gonorrhoeae
cttcaacctcgtcggctttg

SEQ ID NO: 54742 - DNA, 20 bp, Neisseria gonorrhoeae
ttcaacctcgtcggctttgt

SEQ ID NO: 54743 - DNA, 20 bp, Neisseria gonorrhoeae
ggaaaatttgttcataaaca

SEQ ID NO: 54744 - DNA, 20 bp, Neisseria gonorrhoeae
gttcataaacataccttaat

SEQ ID NO: 54745 - DNA, 20 bp, Neisseria gonorrhoeae
ttcataaacataccttaatg

SEQ ID NO: 54746 - DNA, 20 bp, Neisseria gonorrhoeae
ataaacataccttaatgtgt

SEQ ID NO: 54747 - DNA, 20 bp, Neisseria gonorrhoeae
atgtgtttcagacggcatta

SEQ ID NO: 54748 - DNA, 20 bp, Neisseria gonorrhoeae
tttgccgcgggcggcgatga

SEQ ID NO: 54749 - DNA, 20 bp, Neisseria gonorrhoeae
gccgcgggcggcgatgacgc

SEQ ID NO: 54750 - DNA, 20 bp, Neisseria gonorrhoeae
ccgcgggcggcgatgacgcg

SEQ ID NO: 54751 - DNA, 20 bp, Neisseria gonorrhoeae
caaaacggacgcactgcttt

SEQ ID NO: 54752 - DNA, 20 bp, Neisseria gonorrhoeae
cgcccgcttcctgctgcatc

SEQ ID NO: 54753 - DNA, 20 bp, Neisseria gonorrhoeae
acgaaggcaacggcatttcc

SEQ ID NO: 54754 - DNA, 20 bp, Neisseria gonorrhoeae
cgaaggcaacggcatttccg

SEQ ID NO: 54755 - DNA, 20 bp, Neisseria gonorrhoeae
ccgtcaaactctccgccatc

SEQ ID NO: 54756 - DNA, 20 bp, Neisseria gonorrhoeae
cgtcaaactctccgccatcc

SEQ ID NO: 54757 - DNA, 20 bp, Neisseria gonorrhoeae
ggcgcgcgagtagcgcggat

SEQ ID NO: 54758 - DNA, 20 bp, Neisseria gonorrhoeae
ccgaagtgcgcgaagccgtc

SEQ ID NO: 54759 - DNA, 20 bp, Neisseria gonorrhoeae
ctgccgctactacgcaaacg

SEQ ID NO: 54760 - DNA, 20 bp, Neisseria gonorrhoeae
tgccgctactacgcaaacga

SEQ ID NO: 54761 - DNA, 20 bp, Neisseria gonorrhoeae
ggcttcgtttgcgtagtagc

SEQ ID NO: 54762 - DNA, 20 bp, Neisseria gonorrhoeae
gtttgcgtagtagcggcaga

SEQ ID NO: 54763 - DNA, 20 bp, Neisseria gonorrhoeae
ccggttatgccgtttccctc

SEQ ID NO: 54764 - DNA, 20 bp, Neisseria gonorrhoeae
tgccgtttccctcatgcacg

SEQ ID NO: 54765 - DNA, 20 bp, Neisseria gonorrhoeae
ccctcatgcacgaagccggc

SEQ ID NO: 54766 - DNA, 20 bp, Neisseria gonorrhoeae
cctcatgcacgaagccggca

SEQ ID NO: 54767 - DNA, 20 bp, Neisseria gonorrhoeae
gtgcatgagggaaacggcat

SEQ ID NO: 54768 - DNA, 20 bp, Neisseria gonorrhoeae
tcacaggctcgaccgaagtg

SEQ ID NO: 54769 - DNA, 20 bp, Neisseria gonorrhoeae
cacaggctcgaccgaagtgg

SEQ ID NO: 54770 - DNA, 20 bp, Neisseria gonorrhoeae
acaggctcgaccgaagtggc

SEQ ID NO: 54771 - DNA, 20 bp, Neisseria gonorrhoeae
ccaaacgcggcgacaatccc

SEQ ID NO: 54772 - DNA, 20 bp, Neisseria gonorrhoeae
cggcaatcaggacgggattg

SEQ ID NO: 54773 - DNA, 20 bp, Neisseria gonorrhoeae
ctactcggccgacttggacg

SEQ ID NO: 54774 - DNA, 20 bp, Neisseria gonorrhoeae
gacggtttgctgcaaatcag

SEQ ID NO: 54775 - DNA, 20 bp, Neisseria gonorrhoeae
gctgcaaatcagcggcaaac

SEQ ID NO: 54776 - DNA, 20 bp, Neisseria gonorrhoeae
ctgcaaatcagcggcaaacc

SEQ ID NO: 54777 - DNA, 20 bp, Neisseria gonorrhoeae
tcgggtttgccgctgatttg

SEQ ID NO: 54778 - DNA, 20 bp, Neisseria gonorrhoeae
gaaaacacccgcttcaaaac

SEQ ID NO: 54779 - DNA, 20 bp, Neisseria gonorrhoeae
aaaacccacgaagcctcgtt

SEQ ID NO: 54780 - DNA, 20 bp, Neisseria gonorrhoeae
gtgggttttgaagcgggtgt

SEQ ID NO: 54781 - DNA, 20 bp, Neisseria gonorrhoeae
tgaagcgggtgttttccaag

SEQ ID NO: 54782 - DNA, 20 bp, Neisseria gonorrhoeae
gaagcgggtgttttccaagc

SEQ ID NO: 54783 - DNA, 20 bp, Neisseria gonorrhoeae
cgcgcttgcctgcggcgcaa

SEQ ID NO: 54784 - DNA, 20 bp, Neisseria gonorrhoeae
cctgcggcgcaatcggcgca

SEQ ID NO: 54785 - DNA, 20 bp, Neisseria gonorrhoeae
cgccgcaggcaagcgcggaa

SEQ ID NO: 54786 - DNA, 20 bp, Neisseria gonorrhoeae
cgtgcgcctttgccgctgtg

SEQ ID NO: 54787 - DNA, 20 bp, Neisseria gonorrhoeae
gccgctgtgggtcagtgcgc

SEQ ID NO: 54788 - DNA, 20 bp, Neisseria gonorrhoeae
ccttcgccaccggcagcgcg

SEQ ID NO: 54789 - DNA, 20 bp, Neisseria gonorrhoeae
gccaccggcagcgcggcgtt

SEQ ID NO: 54790 - DNA, 20 bp, Neisseria gonorrhoeae
ggcggcagtgcgcaatacgc

SEQ ID NO: 54791 - DNA, 20 bp, Neisseria gonorrhoeae
agggcgtattgcgcactgcc

SEQ ID NO: 54792 - DNA, 20 bp, Neisseria gonorrhoeae
cgcactgccgcccaacgccg

SEQ ID NO: 54793 - DNA, 20 bp, Neisseria gonorrhoeae
gatttcggcttggaagcgga

SEQ ID NO: 54794 - DNA, 20 bp, Neisseria gonorrhoeae
cggcttggaagcggacgcac

SEQ ID NO: 54795 - DNA, 20 bp, Neisseria gonorrhoeae
ggcttggaagcggacgcacg

SEQ ID NO: 54796 - DNA, 20 bp, Neisseria gonorrhoeae
gaagcggacgcacggatcca

SEQ ID NO: 54797 - DNA, 20 bp, Neisseria gonorrhoeae
tcgccggtatggacttggcg

SEQ ID NO: 54798 - DNA, 20 bp, Neisseria gonorrhoeae
ggaagcgggcgcaggtttgt

SEQ ID NO: 54799 - DNA, 20 bp, Neisseria gonorrhoeae
gaagcgggcgcaggtttgtg

SEQ ID NO: 54800 - DNA, 20 bp, Neisseria gonorrhoeae
gtgcgacgaagccgccgtcc

SEQ ID NO: 54801 - DNA, 20 bp, Neisseria gonorrhoeae
tgcgacgaagccgccgtccg

SEQ ID NO: 54802 - DNA, 20 bp, Neisseria gonorrhoeae
gattgccggtttgccctgcg

SEQ ID NO: 54803 - DNA, 20 bp, Neisseria gonorrhoeae
gtccgtcggcatttcccgtc

SEQ ID NO: 54804 - DNA, 20 bp, Neisseria gonorrhoeae
cccgtccatccatcggcact

SEQ ID NO: 54805 - DNA, 20 bp, Neisseria gonorrhoeae
ccgtccatccatcggcactg

SEQ ID NO: 54806 - DNA, 20 bp, Neisseria gonorrhoeae
ggacaggcagtgccgatgga

SEQ ID NO: 54807 - DNA, 20 bp, Neisseria gonorrhoeae
gcggctgatgtcgagcgaga

SEQ ID NO: 54808 - DNA, 20 bp, Neisseria gonorrhoeae
ccatcggatagagtgcgccc

SEQ ID NO: 54809 - DNA, 20 bp, Neisseria gonorrhoeae
gcgtgcgttatgctgcgcct

SEQ ID NO: 54810 - DNA, 20 bp, Neisseria gonorrhoeae
tgctgcgcctgcggcaattt

SEQ ID NO: 54811 - DNA, 20 bp, Neisseria gonorrhoeae
ggttgcggcggtattgcagc

SEQ ID NO: 54812 - DNA, 20 bp, Neisseria gonorrhoeae
gttgcggcggtattgcagca

SEQ ID NO: 54813 - DNA, 20 bp, Neisseria gonorrhoeae
gcaaaaaccttgttgggcgg

SEQ ID NO: 54814 - DNA, 20 bp, Neisseria gonorrhoeae
ttgggcggcggcaatgtgtt

SEQ ID NO: 54815 - DNA, 20 bp, Neisseria gonorrhoeae
ggcggcggcaatgtgttgct

SEQ ID NO: 54816 - DNA, 20 bp, Neisseria gonorrhoeae
ctgctggacgaaccgtccaa

SEQ ID NO: 54817 - DNA, 20 bp, Neisseria gonorrhoeae
ccacgtcgagatcgttggac

SEQ ID NO: 54818 - DNA, 20 bp, Neisseria gonorrhoeae
tttgggacgagattgtcgcc

SEQ ID NO: 54819 - DNA, 20 bp, Neisseria gonorrhoeae
gggacgagattgtcgccatg

SEQ ID NO: 54820 - DNA, 20 bp, Neisseria gonorrhoeae
ggacgagattgtcgccatgc

SEQ ID NO: 54821 - DNA, 20 bp, Neisseria gonorrhoeae
tcgccatgctgtttgtgctg

SEQ ID NO: 54822 - DNA, 20 bp, Neisseria gonorrhoeae
gtgctggcgtttgtgccgtt

SEQ ID NO: 54823 - DNA, 20 bp, Neisseria gonorrhoeae
gctcgggacggagcagcttt

SEQ ID NO: 54824 - DNA, 20 bp, Neisseria gonorrhoeae
tgttcgcattcggcgaacac

SEQ ID NO: 54825 - DNA, 20 bp, Neisseria gonorrhoeae
gttcgcattcggcgaacaca

SEQ ID NO: 54826 - DNA, 20 bp, Neisseria gonorrhoeae
ttcgcattcggcgaacacat

SEQ ID NO: 54827 - DNA, 20 bp, Neisseria gonorrhoeae
gcattcggcgaacacatcat

SEQ ID NO: 54828 - DNA, 20 bp, Neisseria gonorrhoeae
ttttcagcacctgcagattg

SEQ ID NO: 54829 - DNA, 20 bp, Neisseria gonorrhoeae
tttcagcacctgcagattga

SEQ ID NO: 54830 - DNA, 20 bp, Neisseria gonorrhoeae
ttcagcacctgcagattgag

SEQ ID NO: 54831 - DNA, 20 bp, Neisseria gonorrhoeae
tcagcacctgcagattgaga

SEQ ID NO: 54832 - DNA, 20 bp, Neisseria gonorrhoeae
cagcacctgcagattgagaa

SEQ ID NO: 54833 - DNA, 20 bp, Neisseria gonorrhoeae
cgccgcaaattgctggattt

SEQ ID NO: 54834 - DNA, 20 bp, Neisseria gonorrhoeae
ctggatttgcaggacacagg

SEQ ID NO: 54835 - DNA, 20 bp, Neisseria gonorrhoeae
gcaggacacaggcacagacg

SEQ ID NO: 54836 - DNA, 20 bp, Neisseria gonorrhoeae
caggacacaggcacagacga

SEQ ID NO: 54837 - DNA, 20 bp, Neisseria gonorrhoeae
tcgcaagaactcagccgcct

SEQ ID NO: 54838 - DNA, 20 bp, Neisseria gonorrhoeae
ccaacatcagcgtactcccc

SEQ ID NO: 54839 - DNA, 20 bp, Neisseria gonorrhoeae
gcaatcccgccgatgttcag

SEQ ID NO: 54840 - DNA, 20 bp, Neisseria gonorrhoeae
agtaccacgcgtgtttccct

SEQ ID NO: 54841 - DNA, 20 bp, Neisseria gonorrhoeae
cacatcggtcttaaacgccc

SEQ ID NO: 54842 - DNA, 20 bp, Neisseria gonorrhoeae
aacgcccccgccgccgccct

SEQ ID NO: 54843 - DNA, 20 bp, Neisseria gonorrhoeae
aagaccgatgtggaagtggt

SEQ ID NO: 54844 - DNA, 20 bp, Neisseria gonorrhoeae
agaccgatgtggaagtggtt

SEQ ID NO: 54845 - DNA, 20 bp, Neisseria gonorrhoeae
cgccggagagcgcgtcggat

SEQ ID NO: 54846 - DNA, 20 bp, Neisseria gonorrhoeae
ccgaaactgtggatgacggt

SEQ ID NO: 54847 - DNA, 20 bp, Neisseria gonorrhoeae
cagtcggagaaggattatct

SEQ ID NO: 54848 - DNA, 20 bp, Neisseria gonorrhoeae
tccgactgcaacggaccgtc

SEQ ID NO: 54849 - DNA, 20 bp, Neisseria gonorrhoeae
cggcaaggctttcctccgtc

SEQ ID NO: 54850 - DNA, 20 bp, Neisseria gonorrhoeae
ggcaaggctttcctccgtcc

SEQ ID NO: 54851 - DNA, 20 bp, Neisseria gonorrhoeae
cgaccgcgctttggctgccg

SEQ ID NO: 54852 - DNA, 20 bp, Neisseria gonorrhoeae
ggctgccggtgcggtcaata

SEQ ID NO: 54853 - DNA, 20 bp, Neisseria gonorrhoeae
gctgccggtgcggtcaatac

SEQ ID NO: 54854 - DNA, 20 bp, Neisseria gonorrhoeae
gaagacggcagaatacgcgg

SEQ ID NO: 54855 - DNA, 20 bp, Neisseria gonorrhoeae
tcgccgcgtattctgccgtc

SEQ ID NO: 54856 - DNA, 20 bp, Neisseria gonorrhoeae
cggaatatcgaggcttcctg

SEQ ID NO: 54857 - DNA, 20 bp, Neisseria gonorrhoeae
ctgcggcaggtagccgacac

SEQ ID NO: 54858 - DNA, 20 bp, Neisseria gonorrhoeae
gtgtatgggcaggtggcgca

SEQ ID NO: 54859 - DNA, 20 bp, Neisseria gonorrhoeae
cgccacctgcccatacacga

SEQ ID NO: 54860 - DNA, 20 bp, Neisseria gonorrhoeae
ccgccattttgcgcccgata

SEQ ID NO: 54861 - DNA, 20 bp, Neisseria gonorrhoeae
tgcgcccgatatgtccggac

SEQ ID NO: 54862 - DNA, 20 bp, Neisseria gonorrhoeae
gcgcccgatatgtccggact

SEQ ID NO: 54863 - DNA, 20 bp, Neisseria gonorrhoeae
cgcccgatatgtccggactt

SEQ ID NO: 54864 - DNA, 20 bp, Neisseria gonorrhoeae
cccatacccgtgatgacgac

SEQ ID NO: 54865 - DNA, 20 bp, Neisseria gonorrhoeae
aagtgcctgccaccgacgca

SEQ ID NO: 54866 - DNA, 20 bp, Neisseria gonorrhoeae
cgagcgcatcgatgcctgcg

SEQ ID NO: 54867 - DNA, 20 bp, Neisseria gonorrhoeae
gagcgcatcgatgcctgcgt

SEQ ID NO: 54868 - DNA, 20 bp, Neisseria gonorrhoeae
aatcatggcgtttttacgcg

SEQ ID NO: 54869 - DNA, 20 bp, Neisseria gonorrhoeae
atcatggcgtttttacgcgc

SEQ ID NO: 54870 - DNA, 20 bp, Neisseria gonorrhoeae
ccaaacgcttggcagccgga

SEQ ID NO: 54871 - DNA, 20 bp, Neisseria gonorrhoeae
gcagccggacaaagcgttgc

SEQ ID NO: 54872 - DNA, 20 bp, Neisseria gonorrhoeae
cccatatccaagttgtcgcc

SEQ ID NO: 54873 - DNA, 20 bp, Neisseria gonorrhoeae
tcgccagcttcttcatctcg

SEQ ID NO: 54874 - DNA, 20 bp, Neisseria gonorrhoeae
ttcatctcgcgcgtggacag

SEQ ID NO: 54875 - DNA, 20 bp, Neisseria gonorrhoeae
gccgcactggaagcccaagg

SEQ ID NO: 54876 - DNA, 20 bp, Neisseria gonorrhoeae
ccgcactggaagcccaaggc

SEQ ID NO: 54877 - DNA, 20 bp, Neisseria gonorrhoeae
tatgggcatctaccggcgtg

SEQ ID NO: 54878 - DNA, 20 bp, Neisseria gonorrhoeae
atgggcatctaccggcgtga

SEQ ID NO: 54879 - DNA, 20 bp, Neisseria gonorrhoeae
tgggcatctaccggcgtgaa

SEQ ID NO: 54880 - DNA, 20 bp, Neisseria gonorrhoeae
tcagacggcatcgtcggcag

SEQ ID NO: 54881 - DNA, 20 bp, Neisseria gonorrhoeae
cagacggcatcgtcggcagt

SEQ ID NO: 54882 - DNA, 20 bp, Neisseria gonorrhoeae
agacggcatcgtcggcagtt

SEQ ID NO: 54883 - DNA, 20 bp, Neisseria gonorrhoeae
cacccaaaacctcgcccgcg

SEQ ID NO: 54884 - DNA, 20 bp, Neisseria gonorrhoeae
cgtcctgttccgtgcagacg

SEQ ID NO: 54885 - DNA, 20 bp, Neisseria gonorrhoeae
ccacaccgcgccaaatctat

SEQ ID NO: 54886 - DNA, 20 bp, Neisseria gonorrhoeae
cacaccgcgccaaatctatt

SEQ ID NO: 54887 - DNA, 20 bp, Neisseria gonorrhoeae
gcagcagtgtttgggcgttc

SEQ ID NO: 54888 - DNA, 20 bp, Neisseria gonorrhoeae
cagcagtgtttgggcgttcc

SEQ ID NO: 54889 - DNA, 20 bp, Neisseria gonorrhoeae
gggcgttccgacaccgcaat

SEQ ID NO: 54890 - DNA, 20 bp, Neisseria gonorrhoeae
gatttggacttggctgtatg

SEQ ID NO: 54891 - DNA, 20 bp, Neisseria gonorrhoeae
ggacttggctgtatgtgtag

SEQ ID NO: 54892 - DNA, 20 bp, Neisseria gonorrhoeae
gacttggctgtatgtgtaga

SEQ ID NO: 54893 - DNA, 20 bp, Neisseria gonorrhoeae
gctgtatgtgtagaggcgtt

SEQ ID NO: 54894 - DNA, 20 bp, Neisseria gonorrhoeae
caccaaatcggcgtattcga

SEQ ID NO: 54895 - DNA, 20 bp, Neisseria gonorrhoeae
aggttgacctcgttgtagcc

SEQ ID NO: 54896 - DNA, 20 bp, Neisseria gonorrhoeae
acctcgttgtagccgtattc

SEQ ID NO: 54897 - DNA, 20 bp, Neisseria gonorrhoeae
tagccgtattcttcggcggc

SEQ ID NO: 54898 - DNA, 20 bp, Neisseria gonorrhoeae
ttcggcggctttggcggctt

SEQ ID NO: 54899 - DNA, 20 bp, Neisseria gonorrhoeae
ggcggctttggcggctttcg

SEQ ID NO: 54900 - DNA, 20 bp, Neisseria gonorrhoeae
tcatcatcggccggcgcacg

SEQ ID NO: 54901 - DNA, 20 bp, Neisseria gonorrhoeae
catcatcggccggcgcacgt

SEQ ID NO: 54902 - DNA, 20 bp, Neisseria gonorrhoeae
atcatcggccggcgcacgtc

SEQ ID NO: 54903 - DNA, 20 bp, Neisseria gonorrhoeae
tccgtcgggggcgcacggga

SEQ ID NO: 54904 - DNA, 20 bp, Neisseria gonorrhoeae
agcggcttgccgtacatcgc

SEQ ID NO: 54905 - DNA, 20 bp, Neisseria gonorrhoeae
tgtgttgttttcaggttcgg

SEQ ID NO: 54906 - DNA, 20 bp, Neisseria gonorrhoeae
gtgttgttttcaggttcggc

SEQ ID NO: 54907 - DNA, 20 bp, Neisseria gonorrhoeae
tgttgttttcaggttcggcg

SEQ ID NO: 54908 - DNA, 20 bp, Neisseria gonorrhoeae
ttttcaggttcggcgggcgt

SEQ ID NO: 54909 - DNA, 20 bp, Neisseria gonorrhoeae
tcaggttcggcgggcgtgga

SEQ ID NO: 54910 - DNA, 20 bp, Neisseria gonorrhoeae
gtacaacgaagttttgggcg

SEQ ID NO: 54911 - DNA, 20 bp, Neisseria gonorrhoeae
tacaacgaagttttgggcgg

SEQ ID NO: 54912 - DNA, 20 bp, Neisseria gonorrhoeae
tgggcggccggttgccaagc

SEQ ID NO: 54913 - DNA, 20 bp, Neisseria gonorrhoeae
gggcggccggttgccaagcg

SEQ ID NO: 54914 - DNA, 20 bp, Neisseria gonorrhoeae
ggcggccggttgccaagcgt

SEQ ID NO: 54915 - DNA, 20 bp, Neisseria gonorrhoeae
gcggcagcggcgcgattgag

SEQ ID NO: 54916 - DNA, 20 bp, Neisseria gonorrhoeae
agcaagacgcaaacatcatc

SEQ ID NO: 54917 - DNA, 20 bp, Neisseria gonorrhoeae
gcggtgcggcatgatgatga

SEQ ID NO: 54918 - DNA, 20 bp, Neisseria gonorrhoeae
gcgtcttgctcaatcgcgcc

SEQ ID NO: 54919 - DNA, 20 bp, Neisseria gonorrhoeae
cgtcttgctcaatcgcgccg

SEQ ID NO: 54920 - DNA, 20 bp, Neisseria gonorrhoeae
ttggcggatttggcgcaaca

SEQ ID NO: 54921 - DNA, 20 bp, Neisseria gonorrhoeae
gcggatttggcgcaacaggg

SEQ ID NO: 54922 - DNA, 20 bp, Neisseria gonorrhoeae
ggcgcaacagggcggtcagg

SEQ ID NO: 54923 - DNA, 20 bp, Neisseria gonorrhoeae
gcgcaacagggcggtcagga

SEQ ID NO: 54924 - DNA, 20 bp, Neisseria gonorrhoeae
cgcgatacggcggacggttt

SEQ ID NO: 54925 - DNA, 20 bp, Neisseria gonorrhoeae
cgcgcttgcgggcgtgaggt

SEQ ID NO: 54926 - DNA, 20 bp, Neisseria gonorrhoeae
cgggcgtgaggtcgggacgc

SEQ ID NO: 54927 - DNA, 20 bp, Neisseria gonorrhoeae
cttgtacatccgccgtggtg

SEQ ID NO: 54928 - DNA, 20 bp, Neisseria gonorrhoeae
tacatccgccgtggtgttgc

SEQ ID NO: 54929 - DNA, 20 bp, Neisseria gonorrhoeae
ccttgcgcgtccctgccgaa

SEQ ID NO: 54930 - DNA, 20 bp, Neisseria gonorrhoeae
gtactttgaagacgaaacgc

SEQ ID NO: 54931 - DNA, 20 bp, Neisseria gonorrhoeae
gaagacgaaacgccgtggtg

SEQ ID NO: 54932 - DNA, 20 bp, Neisseria gonorrhoeae
aagacgaaacgccgtggtgc

SEQ ID NO: 54933 - DNA, 20 bp, Neisseria gonorrhoeae
gtcggacactgcctgggcaa

SEQ ID NO: 54934 - DNA, 20 bp, Neisseria gonorrhoeae
tcggacactgcctgggcaaa

SEQ ID NO: 54935 - DNA, 20 bp, Neisseria gonorrhoeae
acgacggcggttaagccgcc

SEQ ID NO: 54936 - DNA, 20 bp, Neisseria gonorrhoeae
agccgcccgccgatttggtg

SEQ ID NO: 54937 - DNA, 20 bp, Neisseria gonorrhoeae
ggtgcggccctgcccgaaac

SEQ ID NO: 54938 - DNA, 20 bp, Neisseria gonorrhoeae
gtgcggccctgcccgaaact

SEQ ID NO: 54939 - DNA, 20 bp, Neisseria gonorrhoeae
aagggaacacgggcgcggac

SEQ ID NO: 54940 - DNA, 20 bp, Neisseria gonorrhoeae
ttttgttgcaacgctggatt

SEQ ID NO: 54941 - DNA, 20 bp, Neisseria gonorrhoeae
tttgttgcaacgctggattt

SEQ ID NO: 54942 - DNA, 20 bp, Neisseria gonorrhoeae
ttgttgcaacgctggatttt

SEQ ID NO: 54943 - DNA, 20 bp, Neisseria gonorrhoeae
tgttgcaacgctggattttt

SEQ ID NO: 54944 - DNA, 20 bp, Neisseria gonorrhoeae
gttgcaacgctggatttttg

SEQ ID NO: 54945 - DNA, 20 bp, Neisseria gonorrhoeae
cgccgccgaatacgacaatc

SEQ ID NO: 54946 - DNA, 20 bp, Neisseria gonorrhoeae
gaagcataaaaggctggata

SEQ ID NO: 54947 - DNA, 20 bp, Neisseria gonorrhoeae
tcgtattcggcggcgcaacc

SEQ ID NO: 54948 - DNA, 20 bp, Neisseria gonorrhoeae
ggcggcgcaaccattgtttt

SEQ ID NO: 54949 - DNA, 20 bp, Neisseria gonorrhoeae
ccgcatcctttcaggcacat

SEQ ID NO: 54950 - DNA, 20 bp, Neisseria gonorrhoeae
caggcacatgcgcgactggg

SEQ ID NO: 54951 - DNA, 20 bp, Neisseria gonorrhoeae
aggcacatgcgcgactgggc

SEQ ID NO: 54952 - DNA, 20 bp, Neisseria gonorrhoeae
gtcaaggttggaccggatat

SEQ ID NO: 54953 - DNA, 20 bp, Neisseria gonorrhoeae
gaccggatattcagtccgcc

SEQ ID NO: 54954 - DNA, 20 bp, Neisseria gonorrhoeae
gacggcaaagccgtcattgc

SEQ ID NO: 54955 - DNA, 20 bp, Neisseria gonorrhoeae
ccgtttcttccgcacaggca

SEQ ID NO: 54956 - DNA, 20 bp, Neisseria gonorrhoeae
cttccgcacaggcagtccgc

SEQ ID NO: 54957 - DNA, 20 bp, Neisseria gonorrhoeae
ttccgcacaggcagtccgcg

SEQ ID NO: 54958 - DNA, 20 bp, Neisseria gonorrhoeae
cgcacaggcagtccgcgatc

SEQ ID NO: 54959 - DNA, 20 bp, Neisseria gonorrhoeae
cgccctgccgcttcacgcgt

SEQ ID NO: 54960 - DNA, 20 bp, Neisseria gonorrhoeae
acgcgttcgcaggcttcgta

SEQ ID NO: 54961 - DNA, 20 bp, Neisseria gonorrhoeae
gcaggcttcgtaggcatcgt

SEQ ID NO: 54962 - DNA, 20 bp, Neisseria gonorrhoeae
gtaggcatcgtccacttcaa

SEQ ID NO: 54963 - DNA, 20 bp, Neisseria gonorrhoeae
aaccgcgatgtgtccgtagg

SEQ ID NO: 54964 - DNA, 20 bp, Neisseria gonorrhoeae
ggatttgaagtggcagttgc

SEQ ID NO: 54965 - DNA, 20 bp, Neisseria gonorrhoeae
gaagtggcagttgcggcaac

SEQ ID NO: 54966 - DNA, 20 bp, Neisseria gonorrhoeae
aagtggcagttgcggcaacg

SEQ ID NO: 54967 - DNA, 20 bp, Neisseria gonorrhoeae
cggcaacggtacatcacgct

SEQ ID NO: 54968 - DNA, 20 bp, Neisseria gonorrhoeae
ggttatcggacggcagctcc

SEQ ID NO: 54969 - DNA, 20 bp, Neisseria gonorrhoeae
ggaaggcaggctgccggaca

SEQ ID NO: 54970 - DNA, 20 bp, Neisseria gonorrhoeae
gaaggcaggctgccggacac

SEQ ID NO: 54971 - DNA, 20 bp, Neisseria gonorrhoeae
gtagatttcgcctgtggtgc

SEQ ID NO: 54972 - DNA, 20 bp, Neisseria gonorrhoeae
cgcctgtggtgcggtcgaag

SEQ ID NO: 54973 - DNA, 20 bp, Neisseria gonorrhoeae
gcctgtggtgcggtcgaaga

SEQ ID NO: 54974 - DNA, 20 bp, Neisseria gonorrhoeae
tcttcaatgatggtgggtgc

SEQ ID NO: 54975 - DNA, 20 bp, Neisseria gonorrhoeae
aatgatggtgggtgcggcct

SEQ ID NO: 54976 - DNA, 20 bp, Neisseria gonorrhoeae
agcggcggtgtcggcatcgg

SEQ ID NO: 54977 - DNA, 20 bp, Neisseria gonorrhoeae
aagacaactgcttcatcggc

SEQ ID NO: 54978 - DNA, 20 bp, Neisseria gonorrhoeae
cgccgcaatgccgaaacttt

SEQ ID NO: 54979 - DNA, 20 bp, Neisseria gonorrhoeae
cggcattgcggcggaacgcg

SEQ ID NO: 54980 - DNA, 20 bp, Neisseria gonorrhoeae
ggcattgcggcggaacgcgt

SEQ ID NO: 54981 - DNA, 20 bp, Neisseria gonorrhoeae
cggcggaacgcgtgtttgcg

SEQ ID NO: 54982 - DNA, 20 bp, Neisseria gonorrhoeae
gcgatgtacgactgggtggg

SEQ ID NO: 54983 - DNA, 20 bp, Neisseria gonorrhoeae
actttcgcacccgtccgcaa

SEQ ID NO: 54984 - DNA, 20 bp, Neisseria gonorrhoeae
cgcacccgtccgcaaagcac

SEQ ID NO: 54985 - DNA, 20 bp, Neisseria gonorrhoeae
gcacccgtccgcaaagcacg

SEQ ID NO: 54986 - DNA, 20 bp, Neisseria gonorrhoeae
gcggacgggtgcgaaagtca

SEQ ID NO: 54987 - DNA, 20 bp, Neisseria gonorrhoeae
cggacgggtgcgaaagtcaa

SEQ ID NO: 54988 - DNA, 20 bp, Neisseria gonorrhoeae
tgccgatttgggcgtgccgc

SEQ ID NO: 54989 - DNA, 20 bp, Neisseria gonorrhoeae
gccgatttgggcgtgccgcg

SEQ ID NO: 54990 - DNA, 20 bp, Neisseria gonorrhoeae
ccgatttgggcgtgccgcgc

SEQ ID NO: 54991 - DNA, 20 bp, Neisseria gonorrhoeae
cgcggctgccgatttgccgc

SEQ ID NO: 54992 - DNA, 20 bp, Neisseria gonorrhoeae
gccgctgccgattccgccgg

SEQ ID NO: 54993 - DNA, 20 bp, Neisseria gonorrhoeae
accataacccttatggagtt

SEQ ID NO: 54994 - DNA, 20 bp, Neisseria gonorrhoeae
tggagttgagtatgtacgcg

SEQ ID NO: 54995 - DNA, 20 bp, Neisseria gonorrhoeae
agtatgtacgcggtcgtaaa

SEQ ID NO: 54996 - DNA, 20 bp, Neisseria gonorrhoeae
atactgtttgccgccggttt

SEQ ID NO: 54997 - DNA, 20 bp, Neisseria gonorrhoeae
tactgtttgccgccggtttt

SEQ ID NO: 54998 - DNA, 20 bp, Neisseria gonorrhoeae
aacctcgggctttccagcgc

SEQ ID NO: 54999 - DNA, 20 bp, Neisseria gonorrhoeae
ccagcgcggatattctggca

SEQ ID NO: 55000 - DNA, 20 bp, Neisseria gonorrhoeae
cagcgcggatattctggcaa

SEQ ID NO: 55001 - DNA, 20 bp, Neisseria gonorrhoeae
tggcaaaactgatactcgaa

SEQ ID NO: 55002 - DNA, 20 bp, Neisseria gonorrhoeae
ggcttcgagtatcagttttg

SEQ ID NO: 55003 - DNA, 20 bp, Neisseria gonorrhoeae
cttcgccgttcggctaccgt

SEQ ID NO: 55004 - DNA, 20 bp, Neisseria gonorrhoeae
ttcgccgttcggctaccgta

SEQ ID NO: 55005 - DNA, 20 bp, Neisseria gonorrhoeae
gccgttcggctaccgtatgc

SEQ ID NO: 55006 - DNA, 20 bp, Neisseria gonorrhoeae
ggctaccgtatgcaccccat

SEQ ID NO: 55007 - DNA, 20 bp, Neisseria gonorrhoeae
gggacagtctgcacggaagc

SEQ ID NO: 55008 - DNA, 20 bp, Neisseria gonorrhoeae
ggacagtctgcacggaagcg

SEQ ID NO: 55009 - DNA, 20 bp, Neisseria gonorrhoeae
tcgccgatacggtttggagc

SEQ ID NO: 55010 - DNA, 20 bp, Neisseria gonorrhoeae
cgccgatacggtttggagcc

SEQ ID NO: 55011 - DNA, 20 bp, Neisseria gonorrhoeae
gccgatacggtttggagccg

SEQ ID NO: 55012 - DNA, 20 bp, Neisseria gonorrhoeae
cagcagtgggaagaacgctg

SEQ ID NO: 55013 - DNA, 20 bp, Neisseria gonorrhoeae
gcaccgctttacgaagccgt

SEQ ID NO: 55014 - DNA, 20 bp, Neisseria gonorrhoeae
acgaagccgtccgcaccggc

SEQ ID NO: 55015 - DNA, 20 bp, Neisseria gonorrhoeae
cgaagccgtccgcaccggca

SEQ ID NO: 55016 - DNA, 20 bp, Neisseria gonorrhoeae
gattttgccggtgcggacgg

SEQ ID NO: 55017 - DNA, 20 bp, Neisseria gonorrhoeae
aaaccaattttcagacggca

SEQ ID NO: 55018 - DNA, 20 bp, Neisseria gonorrhoeae
tcagacggcatttgtccctt

SEQ ID NO: 55019 - DNA, 20 bp, Neisseria gonorrhoeae
cagacggcatttgtccctta

SEQ ID NO: 55020 - DNA, 20 bp, Neisseria gonorrhoeae
agacggcatttgtcccttaa

SEQ ID NO: 55021 - DNA, 20 bp, Neisseria gonorrhoeae
gtcccttaaaacacgttttt

SEQ ID NO: 55022 - DNA, 20 bp, Neisseria gonorrhoeae
tttccgggcaaagcaaaaac

SEQ ID NO: 55023 - DNA, 20 bp, Neisseria gonorrhoeae
ttccgggcaaagcaaaaacc

SEQ ID NO: 55024 - DNA, 20 bp, Neisseria gonorrhoeae
tccgggcaaagcaaaaaccc

SEQ ID NO: 55025 - DNA, 20 bp, Neisseria gonorrhoeae
ccgggcaaagcaaaaacccc

SEQ ID NO: 55026 - DNA, 20 bp, Neisseria gonorrhoeae
cgggcaaagcaaaaaccccc

SEQ ID NO: 55027 - DNA, 20 bp, Neisseria gonorrhoeae
gcctgacccactgcctgtcc

SEQ ID NO: 55028 - DNA, 20 bp, Neisseria gonorrhoeae
cctgacccactgcctgtccc

SEQ ID NO: 55029 - DNA, 20 bp, Neisseria gonorrhoeae
aactgacccccgtcatccgt

SEQ ID NO: 55030 - DNA, 20 bp, Neisseria gonorrhoeae
aggcgggcgcgtgcatcggt

SEQ ID NO: 55031 - DNA, 20 bp, Neisseria gonorrhoeae
atcatttcgcgcatcatcag

SEQ ID NO: 55032 - DNA, 20 bp, Neisseria gonorrhoeae
cgcgcatcatcagcgtgttg

SEQ ID NO: 55033 - DNA, 20 bp, Neisseria gonorrhoeae
gcgcatcatcagcgtgttgt

SEQ ID NO: 55034 - DNA, 20 bp, Neisseria gonorrhoeae
agcgcggattttttctgcca

SEQ ID NO: 55035 - DNA, 20 bp, Neisseria gonorrhoeae
tttctgccacgttttaaacc

SEQ ID NO: 55036 - DNA, 20 bp, Neisseria gonorrhoeae
ttctgccacgttttaaacct

SEQ ID NO: 55037 - DNA, 20 bp, Neisseria gonorrhoeae
tctgccacgttttaaacctc

SEQ ID NO: 55038 - DNA, 20 bp, Neisseria gonorrhoeae
ctgccacgttttaaacctcc

SEQ ID NO: 55039 - DNA, 20 bp, Neisseria gonorrhoeae
ccaacagcctgtggcggcgc

SEQ ID NO: 55040 - DNA, 20 bp, Neisseria gonorrhoeae
ggccaccctgcaatcgctcg

SEQ ID NO: 55041 - DNA, 20 bp, Neisseria gonorrhoeae
aacttgattttgcgccaaac

SEQ ID NO: 55042 - DNA, 20 bp, Neisseria gonorrhoeae
attttgcgccaaaccggcct

SEQ ID NO: 55043 - DNA, 20 bp, Neisseria gonorrhoeae
tgcgccaaaccggcctgctg

SEQ ID NO: 55044 - DNA, 20 bp, Neisseria gonorrhoeae
cgcccaccgaagccatcggc

SEQ ID NO: 55045 - DNA, 20 bp, Neisseria gonorrhoeae
gcccaccgaagccatcggca

SEQ ID NO: 55046 - DNA, 20 bp, Neisseria gonorrhoeae
ggtgggcgaaatcagcttgg

SEQ ID NO: 55047 - DNA, 20 bp, Neisseria gonorrhoeae
ggcagccattcgatgacggc

SEQ ID NO: 55048 - DNA, 20 bp, Neisseria gonorrhoeae
gatgacggcggcggtgtggg

SEQ ID NO: 55049 - DNA, 20 bp, Neisseria gonorrhoeae
gatagaacaacgcggcggca

SEQ ID NO: 55050 - DNA, 20 bp, Neisseria gonorrhoeae
atcgaaatcaccgtccccga

SEQ ID NO: 55051 - DNA, 20 bp, Neisseria gonorrhoeae
gatgccggcttcggggacgg

SEQ ID NO: 55052 - DNA, 20 bp, Neisseria gonorrhoeae
atgccggcttcggggacggt

SEQ ID NO: 55053 - DNA, 20 bp, Neisseria gonorrhoeae
ggggacggtgatttcgatga

SEQ ID NO: 55054 - DNA, 20 bp, Neisseria gonorrhoeae
tcgtcggcactcaaatcgaa

SEQ ID NO: 55055 - DNA, 20 bp, Neisseria gonorrhoeae
tcttgtccaatatttatttg

SEQ ID NO: 55056 - DNA, 20 bp, Neisseria gonorrhoeae
cttgtccaatatttatttgg

SEQ ID NO: 55057 - DNA, 20 bp, Neisseria gonorrhoeae
ttgtccaatatttatttggg

SEQ ID NO: 55058 - DNA, 20 bp, Neisseria gonorrhoeae
tccaatatttatttggggtt

SEQ ID NO: 55059 - DNA, 20 bp, Neisseria gonorrhoeae
gaatcggctcggcgagcagc

SEQ ID NO: 55060 - DNA, 20 bp, Neisseria gonorrhoeae
aatcggctcggcgagcagct

SEQ ID NO: 55061 - DNA, 20 bp, Neisseria gonorrhoeae
ggttcgagcttgttcagacc

SEQ ID NO: 55062 - DNA, 20 bp, Neisseria gonorrhoeae
gagcttgttcagaccgcgca

SEQ ID NO: 55063 - DNA, 20 bp, Neisseria gonorrhoeae
ttcagaccgcgcaggtgggc

SEQ ID NO: 55064 - DNA, 20 bp, Neisseria gonorrhoeae
gccgatgatttcggcaagtt

SEQ ID NO: 55065 - DNA, 20 bp, Neisseria gonorrhoeae
ccgatgatttcggcaagttt

SEQ ID NO: 55066 - DNA, 20 bp, Neisseria gonorrhoeae
cggcaagtttgggcaggatg

SEQ ID NO: 55067 - DNA, 20 bp, Neisseria gonorrhoeae
ggcaagtttgggcaggatga

SEQ ID NO: 55068 - DNA, 20 bp, Neisseria gonorrhoeae
gggcaggatgacggtttcgc

SEQ ID NO: 55069 - DNA, 20 bp, Neisseria gonorrhoeae
ggtttctgctcgtgcggcag

SEQ ID NO: 55070 - DNA, 20 bp, Neisseria gonorrhoeae
ctgctcgtgcggcagggcaa

SEQ ID NO: 55071 - DNA, 20 bp, Neisseria gonorrhoeae
tgctcgtgcggcagggcaat

SEQ ID NO: 55072 - DNA, 20 bp, Neisseria gonorrhoeae
agccctaccgaaaccgactt

SEQ ID NO: 55073 - DNA, 20 bp, Neisseria gonorrhoeae
ccggcaaacgcgcccttgtt

SEQ ID NO: 55074 - DNA, 20 bp, Neisseria gonorrhoeae
ggtgcggacaggcgcgccga

SEQ ID NO: 55075 - DNA, 20 bp, Neisseria gonorrhoeae
gagcgcgtggacggcttctt

SEQ ID NO: 55076 - DNA, 20 bp, Neisseria gonorrhoeae
agcgcgtggacggcttcttc

SEQ ID NO: 55077 - DNA, 20 bp, Neisseria gonorrhoeae
ttcaaaggcgggaaccatta

SEQ ID NO: 55078 - DNA, 20 bp, Neisseria gonorrhoeae
aaaggcgggaaccattacgc

SEQ ID NO: 55079 - DNA, 20 bp, Neisseria gonorrhoeae
cgcgcctggtcgtagatttt

SEQ ID NO: 55080 - DNA, 20 bp, Neisseria gonorrhoeae
tgcggatggtactttccgcg

SEQ ID NO: 55081 - DNA, 20 bp, Neisseria gonorrhoeae
gcggatggtactttccgcgc

SEQ ID NO: 55082 - DNA, 20 bp, Neisseria gonorrhoeae
cggatggtactttccgcgcc

SEQ ID NO: 55083 - DNA, 20 bp, Neisseria gonorrhoeae
ccgcgccgacggcggcgttt

SEQ ID NO: 55084 - DNA, 20 bp, Neisseria gonorrhoeae
tgcatcactgcctgctggcg

SEQ ID NO: 55085 - DNA, 20 bp, Neisseria gonorrhoeae
gcatcactgcctgctggcgg

SEQ ID NO: 55086 - DNA, 20 bp, Neisseria gonorrhoeae
catcactgcctgctggcgga

SEQ ID NO: 55087 - DNA, 20 bp, Neisseria gonorrhoeae
ttcggcaatgatgttgtcgg

SEQ ID NO: 55088 - DNA, 20 bp, Neisseria gonorrhoeae
tcggcaatgatgttgtcggc

SEQ ID NO: 55089 - DNA, 20 bp, Neisseria gonorrhoeae
tgcgggtgcggcttcttttt

SEQ ID NO: 55090 - DNA, 20 bp, Neisseria gonorrhoeae
tttttgcgccgtggcggcag

SEQ ID NO: 55091 - DNA, 20 bp, Neisseria gonorrhoeae
ttgcgccgtggcggcagctt

SEQ ID NO: 55092 - DNA, 20 bp, Neisseria gonorrhoeae
tgcgccgtggcggcagcttt

SEQ ID NO: 55093 - DNA, 20 bp, Neisseria gonorrhoeae
gcgccgtggcggcagctttg

SEQ ID NO: 55094 - DNA, 20 bp, Neisseria gonorrhoeae
gcagccgccgtccgccttgt

SEQ ID NO: 55095 - DNA, 20 bp, Neisseria gonorrhoeae
cagccgccgtccgccttgtt

SEQ ID NO: 55096 - DNA, 20 bp, Neisseria gonorrhoeae
ttcggtttccatacggacgt

SEQ ID NO: 55097 - DNA, 20 bp, Neisseria gonorrhoeae
ggtttccatacggacgttgt

SEQ ID NO: 55098 - DNA, 20 bp, Neisseria gonorrhoeae
ccatacggacgttgtgcgct

SEQ ID NO: 55099 - DNA, 20 bp, Neisseria gonorrhoeae
cgttactgcaaaacaggcag

SEQ ID NO: 55100 - DNA, 20 bp, Neisseria gonorrhoeae
gttactgcaaaacaggcagg

SEQ ID NO: 55101 - DNA, 20 bp, Neisseria gonorrhoeae
ctgcaaaacaggcaggtcga

SEQ ID NO: 55102 - DNA, 20 bp, Neisseria gonorrhoeae
tgcggattcggacgcgccct

SEQ ID NO: 55103 - DNA, 20 bp, Neisseria gonorrhoeae
ggacgcgccctgcgcaccgc

SEQ ID NO: 55104 - DNA, 20 bp, Neisseria gonorrhoeae
gctccaaggttttcagacgg

SEQ ID NO: 55105 - DNA, 20 bp, Neisseria gonorrhoeae
tcagacggcatttgccgcag

SEQ ID NO: 55106 - DNA, 20 bp, Neisseria gonorrhoeae
cagacggcatttgccgcagg

SEQ ID NO: 55107 - DNA, 20 bp, Neisseria gonorrhoeae
agacggcatttgccgcaggg

SEQ ID NO: 55108 - DNA, 20 bp, Neisseria gonorrhoeae
gccgcagggtgcaaaacact

SEQ ID NO: 55109 - DNA, 20 bp, Neisseria gonorrhoeae
atcgattcgatacgcggcaa

SEQ ID NO: 55110 - DNA, 20 bp, Neisseria gonorrhoeae
gatacgcggcaaacaccgcc

SEQ ID NO: 55111 - DNA, 20 bp, Neisseria gonorrhoeae
ccgaaatcaaaaaggcaagc

SEQ ID NO: 55112 - DNA, 20 bp, Neisseria gonorrhoeae
cctttttgatttcggcaatg

SEQ ID NO: 55113 - DNA, 20 bp, Neisseria gonorrhoeae
ttgatttcggcaatgacggc

SEQ ID NO: 55114 - DNA, 20 bp, Neisseria gonorrhoeae
ccgatatgcttgccgccacg

SEQ ID NO: 55115 - DNA, 20 bp, Neisseria gonorrhoeae
ccgccacgcccgaaaccgaa

SEQ ID NO: 55116 - DNA, 20 bp, Neisseria gonorrhoeae
gaggtcggtttcggtttcgg

SEQ ID NO: 55117 - DNA, 20 bp, Neisseria gonorrhoeae
cggtttcgggcgtggcggca

SEQ ID NO: 55118 - DNA, 20 bp, Neisseria gonorrhoeae
ggtttcgggcgtggcggcaa

SEQ ID NO: 55119 - DNA, 20 bp, Neisseria gonorrhoeae
cagacgaatgtttcgatttc

SEQ ID NO: 55120 - DNA, 20 bp, Neisseria gonorrhoeae
agacgaatgtttcgatttcg

SEQ ID NO: 55121 - DNA, 20 bp, Neisseria gonorrhoeae
cgatttcgtcctacccgttc

SEQ ID NO: 55122 - DNA, 20 bp, Neisseria gonorrhoeae
gatttcgtcctacccgttcc

SEQ ID NO: 55123 - DNA, 20 bp, Neisseria gonorrhoeae
cgtcctacccgttccgctaa

SEQ ID NO: 55124 - DNA, 20 bp, Neisseria gonorrhoeae
caaaaaggcgacgttttact

SEQ ID NO: 55125 - DNA, 20 bp, Neisseria gonorrhoeae
aaaaaggcgacgttttactg

SEQ ID NO: 55126 - DNA, 20 bp, Neisseria gonorrhoeae
tactgttcgggccggaaacg

SEQ ID NO: 55127 - DNA, 20 bp, Neisseria gonorrhoeae
actgttcgggccggaaacgc

SEQ ID NO: 55128 - DNA, 20 bp, Neisseria gonorrhoeae
ctgttcgggccggaaacgcg

SEQ ID NO: 55129 - DNA, 20 bp, Neisseria gonorrhoeae
cggcggagaccgctacgata

SEQ ID NO: 55130 - DNA, 20 bp, Neisseria gonorrhoeae
accgccgcccacaaaaccct

SEQ ID NO: 55131 - DNA, 20 bp, Neisseria gonorrhoeae
ccgccgcccacaaaaccctg

SEQ ID NO: 55132 - DNA, 20 bp, Neisseria gonorrhoeae
ttggtgttggttacgcgcac

SEQ ID NO: 55133 - DNA, 20 bp, Neisseria gonorrhoeae
tggtgttggttacgcgcaca

SEQ ID NO: 55134 - DNA, 20 bp, Neisseria gonorrhoeae
cagaagaagatgtcaaacgc

SEQ ID NO: 55135 - DNA, 20 bp, Neisseria gonorrhoeae
ttttgccgattcccggagcg

SEQ ID NO: 55136 - DNA, 20 bp, Neisseria gonorrhoeae
tttgccgattcccggagcgg

SEQ ID NO: 55137 - DNA, 20 bp, Neisseria gonorrhoeae
ttgccgattcccggagcgga

SEQ ID NO: 55138 - DNA, 20 bp, Neisseria gonorrhoeae
tgccgattcccggagcggag

SEQ ID NO: 55139 - DNA, 20 bp, Neisseria gonorrhoeae
gccgaaaaaggttgggaact

SEQ ID NO: 55140 - DNA, 20 bp, Neisseria gonorrhoeae
ccgaaaaaggttgggaactg

SEQ ID NO: 55141 - DNA, 20 bp, Neisseria gonorrhoeae
ggaactggcggcaatggcgg

SEQ ID NO: 55142 - DNA, 20 bp, Neisseria gonorrhoeae
tcggtcgtgtgggcgtttgc

SEQ ID NO: 55143 - DNA, 20 bp, Neisseria gonorrhoeae
cggtcgtgtgggcgtttgcc

SEQ ID NO: 55144 - DNA, 20 bp, Neisseria gonorrhoeae
atggttacggtgcgcgccca

SEQ ID NO: 55145 - DNA, 20 bp, Neisseria gonorrhoeae
tggttacggtgcgcgcccaa

SEQ ID NO: 55146 - DNA, 20 bp, Neisseria gonorrhoeae
cggtgcgcgcccaaatgcgg

SEQ ID NO: 55147 - DNA, 20 bp, Neisseria gonorrhoeae
gtgcagcttcatcgtcaaca

SEQ ID NO: 55148 - DNA, 20 bp, Neisseria gonorrhoeae
acgatgaagctgcacgaatg

SEQ ID NO: 55149 - DNA, 20 bp, Neisseria gonorrhoeae
ctcagcgaacacgtcgagtg

SEQ ID NO: 55150 - DNA, 20 bp, Neisseria gonorrhoeae
ggacggcatcggttcagtcg

SEQ ID NO: 55151 - DNA, 20 bp, Neisseria gonorrhoeae
agtcgtgctgccactcgacg

SEQ ID NO: 55152 - DNA, 20 bp, Neisseria gonorrhoeae
gctgaggaagccgccgctct

SEQ ID NO: 55153 - DNA, 20 bp, Neisseria gonorrhoeae
cgcctgcggcgaccgcgtcc

SEQ ID NO: 55154 - DNA, 20 bp, Neisseria gonorrhoeae
gcctgcggcgaccgcgtccg

SEQ ID NO: 55155 - DNA, 20 bp, Neisseria gonorrhoeae
tttgcgggtgctggcttcgt

SEQ ID NO: 55156 - DNA, 20 bp, Neisseria gonorrhoeae
ttgcgggtgctggcttcgta

SEQ ID NO: 55157 - DNA, 20 bp, Neisseria gonorrhoeae
tgcgggtgctggcttcgtag

SEQ ID NO: 55158 - DNA, 20 bp, Neisseria gonorrhoeae
gcgcttgagcgcggccacgc

SEQ ID NO: 55159 - DNA, 20 bp, Neisseria gonorrhoeae
cgcttgagcgcggccacgcc

SEQ ID NO: 55160 - DNA, 20 bp, Neisseria gonorrhoeae
agcgcggccacgccgaacag

SEQ ID NO: 55161 - DNA, 20 bp, Neisseria gonorrhoeae
ggcgtggccgcgctcaagcg

SEQ ID NO: 55162 - DNA, 20 bp, Neisseria gonorrhoeae
cggacaccacctgatcgagc

SEQ ID NO: 55163 - DNA, 20 bp, Neisseria gonorrhoeae
gcgtttatggcgggcgcggt

SEQ ID NO: 55164 - DNA, 20 bp, Neisseria gonorrhoeae
atggcgggcgcggtcggctt

SEQ ID NO: 55165 - DNA, 20 bp, Neisseria gonorrhoeae
tggcgggcgcggtcggcttt

SEQ ID NO: 55166 - DNA, 20 bp, Neisseria gonorrhoeae
gcggcgggcctctattacgc

SEQ ID NO: 55167 - DNA, 20 bp, Neisseria gonorrhoeae
cggcgggcctctattacgcc

SEQ ID NO: 55168 - DNA, 20 bp, Neisseria gonorrhoeae
ccaacgcgccgtaatgcgtc

SEQ ID NO: 55169 - DNA, 20 bp, Neisseria gonorrhoeae
gtcatcactggcccacaagt

SEQ ID NO: 55170 - DNA, 20 bp, Neisseria gonorrhoeae
tcatcactggcccacaagtc

SEQ ID NO: 55171 - DNA, 20 bp, Neisseria gonorrhoeae
ttgttgccggcggacttgtg

SEQ ID NO: 55172 - DNA, 20 bp, Neisseria gonorrhoeae
ttgccggcggacttgtgggc

SEQ ID NO: 55173 - DNA, 20 bp, Neisseria gonorrhoeae
catcgaatcaggcagccaga

SEQ ID NO: 55174 - DNA, 20 bp, Neisseria gonorrhoeae
tgccgatttacccatcgcac

SEQ ID NO: 55175 - DNA, 20 bp, Neisseria gonorrhoeae
acccatcgcaccgacaaaca

SEQ ID NO: 55176 - DNA, 20 bp, Neisseria gonorrhoeae
cccatcgcaccgacaaacag

SEQ ID NO: 55177 - DNA, 20 bp, Neisseria gonorrhoeae
gattaccgtaacctgtttgc

SEQ ID NO: 55178 - DNA, 20 bp, Neisseria gonorrhoeae
gccctccccttccgtcttga

SEQ ID NO: 55179 - DNA, 20 bp, Neisseria gonorrhoeae
ccctccccttccgtcttgag

SEQ ID NO: 55180 - DNA, 20 bp, Neisseria gonorrhoeae
cgtcttgaggccgtctgaaa

SEQ ID NO: 55181 - DNA, 20 bp, Neisseria gonorrhoeae
aggccgtctgaaacttcgct

SEQ ID NO: 55182 - DNA, 20 bp, Neisseria gonorrhoeae
gctttcttcggcagattcga

SEQ ID NO: 55183 - DNA, 20 bp, Neisseria gonorrhoeae
gcatctggtgctgaccttct

SEQ ID NO: 55184 - DNA, 20 bp, Neisseria gonorrhoeae
catctggtgctgaccttctg

SEQ ID NO: 55185 - DNA, 20 bp, Neisseria gonorrhoeae
tgcgtgagcgcgatgatttg

SEQ ID NO: 55186 - DNA, 20 bp, Neisseria gonorrhoeae
ggatgctgatgcaggcggag

SEQ ID NO: 55187 - DNA, 20 bp, Neisseria gonorrhoeae
gatgctgatgcaggcggagt

SEQ ID NO: 55188 - DNA, 20 bp, Neisseria gonorrhoeae
gaggccgtctgaacgccctc

SEQ ID NO: 55189 - DNA, 20 bp, Neisseria gonorrhoeae
aggccgtctgaacgccctcc

SEQ ID NO: 55190 - DNA, 20 bp, Neisseria gonorrhoeae
tccagtttggacggcaggct

SEQ ID NO: 55191 - DNA, 20 bp, Neisseria gonorrhoeae
ggacggcaggctttccgcat

SEQ ID NO: 55192 - DNA, 20 bp, Neisseria gonorrhoeae
agacggcctcaaaccgcctc

SEQ ID NO: 55193 - DNA, 20 bp, Neisseria gonorrhoeae
atgtccgtggcagatttgtt

SEQ ID NO: 55194 - DNA, 20 bp, Neisseria gonorrhoeae
tgtccgtggcagatttgttc

SEQ ID NO: 55195 - DNA, 20 bp, Neisseria gonorrhoeae
ccgcacacgcccagccgcgc

SEQ ID NO: 55196 - DNA, 20 bp, Neisseria gonorrhoeae
cgcacacgcccagccgcgct

SEQ ID NO: 55197 - DNA, 20 bp, Neisseria gonorrhoeae
gacaccattgtgccgctgtt

SEQ ID NO: 55198 - DNA, 20 bp, Neisseria gonorrhoeae
cgccagttttttcagcaccc

SEQ ID NO: 55199 - DNA, 20 bp, Neisseria gonorrhoeae
tttcagcacccggttgcttt

SEQ ID NO: 55200 - DNA, 20 bp, Neisseria gonorrhoeae
ttcagcacccggttgctttt

SEQ ID NO: 55201 - DNA, 20 bp, Neisseria gonorrhoeae
tcagcacccggttgcttttt

SEQ ID NO: 55202 - DNA, 20 bp, Neisseria gonorrhoeae
cagcacccggttgctttttt

SEQ ID NO: 55203 - DNA, 20 bp, Neisseria gonorrhoeae
gcatccggactggtcaacgc

SEQ ID NO: 55204 - DNA, 20 bp, Neisseria gonorrhoeae
ggcaggacaattcctgttcg

SEQ ID NO: 55205 - DNA, 20 bp, Neisseria gonorrhoeae
tcctgccgaaccgcctgcgt

SEQ ID NO: 55206 - DNA, 20 bp, Neisseria gonorrhoeae
accagtccggatgccaagcc

SEQ ID NO: 55207 - DNA, 20 bp, Neisseria gonorrhoeae
gtgtgtggggacttgggcgg

SEQ ID NO: 55208 - DNA, 20 bp, Neisseria gonorrhoeae
ccggcggcaacaacgccgcc

SEQ ID NO: 55209 - DNA, 20 bp, Neisseria gonorrhoeae
tgactgcttctccgaggctt

SEQ ID NO: 55210 - DNA, 20 bp, Neisseria gonorrhoeae
gactgcttctccgaggcttt

SEQ ID NO: 55211 - DNA, 20 bp, Neisseria gonorrhoeae
actgcttctccgaggctttg

SEQ ID NO: 55212 - DNA, 20 bp, Neisseria gonorrhoeae
tccgaggctttgtccgtgtg

SEQ ID NO: 55213 - DNA, 20 bp, Neisseria gonorrhoeae
ctcggctcgtacatcggcgg

SEQ ID NO: 55214 - DNA, 20 bp, Neisseria gonorrhoeae
cacaattcggtgactacggc

SEQ ID NO: 55215 - DNA, 20 bp, Neisseria gonorrhoeae
ggtgactacggctggatgtg

SEQ ID NO: 55216 - DNA, 20 bp, Neisseria gonorrhoeae
tgtaatcacgatgccgccga

SEQ ID NO: 55217 - DNA, 20 bp, Neisseria gonorrhoeae
agcccaccgaaaccaatccc

SEQ ID NO: 55218 - DNA, 20 bp, Neisseria gonorrhoeae
tatcccgtcattctcgcgca

SEQ ID NO: 55219 - DNA, 20 bp, Neisseria gonorrhoeae
ctgtgccggtttgagccggt

SEQ ID NO: 55220 - DNA, 20 bp, Neisseria gonorrhoeae
gagccggtgaggttggtggc

SEQ ID NO: 55221 - DNA, 20 bp, Neisseria gonorrhoeae
agccggtgaggttggtggcg

SEQ ID NO: 55222 - DNA, 20 bp, Neisseria gonorrhoeae
cccgacctgaacaaagccgt

SEQ ID NO: 55223 - DNA, 20 bp, Neisseria gonorrhoeae
cgccacaaacaactgggact

SEQ ID NO: 55224 - DNA, 20 bp, Neisseria gonorrhoeae
tggacgctgctgcccgaagc

SEQ ID NO: 55225 - DNA, 20 bp, Neisseria gonorrhoeae
gggcagcagcgtccagaagt

SEQ ID NO: 55226 - DNA, 20 bp, Neisseria gonorrhoeae
tttgtggcggaacgcatatt

SEQ ID NO: 55227 - DNA, 20 bp, Neisseria gonorrhoeae
tcctgcttccgagaccgaag

SEQ ID NO: 55228 - DNA, 20 bp, Neisseria gonorrhoeae
cgagaccgaagcggcttccc

SEQ ID NO: 55229 - DNA, 20 bp, Neisseria gonorrhoeae
ccaagtacaggcctcggaag

SEQ ID NO: 55230 - DNA, 20 bp, Neisseria gonorrhoeae
cgaggcctgtacttgggaag

SEQ ID NO: 55231 - DNA, 20 bp, Neisseria gonorrhoeae
ggaagccgcttcggtctcgg

SEQ ID NO: 55232 - DNA, 20 bp, Neisseria gonorrhoeae
aatgctgcgctgctgggcag

SEQ ID NO: 55233 - DNA, 20 bp, Neisseria gonorrhoeae
tgggacggacgtgccgccga

SEQ ID NO: 55234 - DNA, 20 bp, Neisseria gonorrhoeae
gggacggacgtgccgccgat

SEQ ID NO: 55235 - DNA, 20 bp, Neisseria gonorrhoeae
ggacggacgtgccgccgatg

SEQ ID NO: 55236 - DNA, 20 bp, Neisseria gonorrhoeae
aggaacaggctggcgggcct

SEQ ID NO: 55237 - DNA, 20 bp, Neisseria gonorrhoeae
gaaggattccgccgcgctgc

SEQ ID NO: 55238 - DNA, 20 bp, Neisseria gonorrhoeae
aaggattccgccgcgctgcg

SEQ ID NO: 55239 - DNA, 20 bp, Neisseria gonorrhoeae
cgccgcgctgcgggagccgc

SEQ ID NO: 55240 - DNA, 20 bp, Neisseria gonorrhoeae
cttgccagaagcgtttgcct

SEQ ID NO: 55241 - DNA, 20 bp, Neisseria gonorrhoeae
ttgccagaagcgtttgcctg

SEQ ID NO: 55242 - DNA, 20 bp, Neisseria gonorrhoeae
gtccacttgggtaagcaggt

SEQ ID NO: 55243 - DNA, 20 bp, Neisseria gonorrhoeae
ggtaagcaggtggtgcagtc

SEQ ID NO: 55244 - DNA, 20 bp, Neisseria gonorrhoeae
cgtggaagagggtgaggatt

SEQ ID NO: 55245 - DNA, 20 bp, Neisseria gonorrhoeae
gtggaagagggtgaggattt

SEQ ID NO: 55246 - DNA, 20 bp, Neisseria gonorrhoeae
cgtcgtggcttaaacgcgct

SEQ ID NO: 55247 - DNA, 20 bp, Neisseria gonorrhoeae
ggtgatgccggtcagacgct

SEQ ID NO: 55248 - DNA, 20 bp, Neisseria gonorrhoeae
gcccagccggtgtgcgtttg

SEQ ID NO: 55249 - DNA, 20 bp, Neisseria gonorrhoeae
gacaacaacagctacaaaat

SEQ ID NO: 55250 - DNA, 20 bp, Neisseria gonorrhoeae
cccagtcggacagcgcgttg

SEQ ID NO: 55251 - DNA, 20 bp, Neisseria gonorrhoeae
acgacggatacgcccacgcc

SEQ ID NO: 55252 - DNA, 20 bp, Neisseria gonorrhoeae
tgtagctgttgttgtcgaat

SEQ ID NO: 55253 - DNA, 20 bp, Neisseria gonorrhoeae
gtagctgttgttgtcgaatt

SEQ ID NO: 55254 - DNA, 20 bp, Neisseria gonorrhoeae
ccgccccgaccaacggcgcg

SEQ ID NO: 55255 - DNA, 20 bp, Neisseria gonorrhoeae
ccgccgtattgcattatttc

SEQ ID NO: 55256 - DNA, 20 bp, Neisseria gonorrhoeae
cggaaataatgcaatacggc

SEQ ID NO: 55257 - DNA, 20 bp, Neisseria gonorrhoeae
gtcggggcggtaacgacgcg

SEQ ID NO: 55258 - DNA, 20 bp, Neisseria gonorrhoeae
ccggcgcggatgtcggttgt

SEQ ID NO: 55259 - DNA, 20 bp, Neisseria gonorrhoeae
cggcgcggatgtcggttgtc

SEQ ID NO: 55260 - DNA, 20 bp, Neisseria gonorrhoeae
tcagggcgaagtcggcgtag

SEQ ID NO: 55261 - DNA, 20 bp, Neisseria gonorrhoeae
aatggcggcgggtgcatacg

SEQ ID NO: 55262 - DNA, 20 bp, Neisseria gonorrhoeae
ggcgtatgcacccgccgcca

SEQ ID NO: 55263 - DNA, 20 bp, Neisseria gonorrhoeae
gaagacggcacggacaaaaa

SEQ ID NO: 55264 - DNA, 20 bp, Neisseria gonorrhoeae
tttgtccgtgccgtcttcca

SEQ ID NO: 55265 - DNA, 20 bp, Neisseria gonorrhoeae
ttgtccgtgccgtcttccaa

SEQ ID NO: 55266 - DNA, 20 bp, Neisseria gonorrhoeae
tgtccgtgccgtcttccaag

SEQ ID NO: 55267 - DNA, 20 bp, Neisseria gonorrhoeae
gtccgtgccgtcttccaaga

SEQ ID NO: 55268 - DNA, 20 bp, Neisseria gonorrhoeae
gatgccgtaagccgccatcg

SEQ ID NO: 55269 - DNA, 20 bp, Neisseria gonorrhoeae
atgccgtaagccgccatcgg

SEQ ID NO: 55270 - DNA, 20 bp, Neisseria gonorrhoeae
tgccgacggcgtatgcttct

SEQ ID NO: 55271 - DNA, 20 bp, Neisseria gonorrhoeae
gccgacggcgtatgcttctg

SEQ ID NO: 55272 - DNA, 20 bp, Neisseria gonorrhoeae
ccgacggcgtatgcttctgc

SEQ ID NO: 55273 - DNA, 20 bp, Neisseria gonorrhoeae
tccgacaaaatccggctcac

SEQ ID NO: 55274 - DNA, 20 bp, Neisseria gonorrhoeae
ccgacaaaatccggctcaca

SEQ ID NO: 55275 - DNA, 20 bp, Neisseria gonorrhoeae
cgacaaaatccggctcacaa

SEQ ID NO: 55276 - DNA, 20 bp, Neisseria gonorrhoeae
gcgatgtcgtccacggcgat

SEQ ID NO: 55277 - DNA, 20 bp, Neisseria gonorrhoeae
tgagccggattttgtcggaa

SEQ ID NO: 55278 - DNA, 20 bp, Neisseria gonorrhoeae
ccgaacgcgaagccgccgtc

SEQ ID NO: 55279 - DNA, 20 bp, Neisseria gonorrhoeae
cggacggcggcttcgcgttc

SEQ ID NO: 55280 - DNA, 20 bp, Neisseria gonorrhoeae
gcgttcggcaagcatggcct

SEQ ID NO: 55281 - DNA, 20 bp, Neisseria gonorrhoeae
ggcaagcatggccttgcgtt

SEQ ID NO: 55282 - DNA, 20 bp, Neisseria gonorrhoeae
cgttcgtcggcttcgcgctg

SEQ ID NO: 55283 - DNA, 20 bp, Neisseria gonorrhoeae
gggcgcgccgctgccgcaca

SEQ ID NO: 55284 - DNA, 20 bp, Neisseria gonorrhoeae
cgcaaaacagccgttgaccg

SEQ ID NO: 55285 - DNA, 20 bp, Neisseria gonorrhoeae
accgcaacccgatagctgcc

SEQ ID NO: 55286 - DNA, 20 bp, Neisseria gonorrhoeae
cgcagcgttttcgccagcga

SEQ ID NO: 55287 - DNA, 20 bp, Neisseria gonorrhoeae
cggtcaacggctgttttgcg

SEQ ID NO: 55288 - DNA, 20 bp, Neisseria gonorrhoeae
tccgcgccgtttcacggtcg

SEQ ID NO: 55289 - DNA, 20 bp, Neisseria gonorrhoeae
ccgcgccgtttcacggtcgt

SEQ ID NO: 55290 - DNA, 20 bp, Neisseria gonorrhoeae
cgcgccgtttcacggtcgtc

SEQ ID NO: 55291 - DNA, 20 bp, Neisseria gonorrhoeae
cacggtcgtcttccaagggc

SEQ ID NO: 55292 - DNA, 20 bp, Neisseria gonorrhoeae
acggtcgtcttccaagggca

SEQ ID NO: 55293 - DNA, 20 bp, Neisseria gonorrhoeae
cagacggcatttccttctcc

SEQ ID NO: 55294 - DNA, 20 bp, Neisseria gonorrhoeae
agacggcatttccttctccg

SEQ ID NO: 55295 - DNA, 20 bp, Neisseria gonorrhoeae
ccttctccgccacgcgcaca

SEQ ID NO: 55296 - DNA, 20 bp, Neisseria gonorrhoeae
cttctccgccacgcgcacag

SEQ ID NO: 55297 - DNA, 20 bp, Neisseria gonorrhoeae
tccgccacgcgcacaggcgg

SEQ ID NO: 55298 - DNA, 20 bp, Neisseria gonorrhoeae
cggacttttggaattgagcc

SEQ ID NO: 55299 - DNA, 20 bp, Neisseria gonorrhoeae
ggacttttggaattgagccg

SEQ ID NO: 55300 - DNA, 20 bp, Neisseria gonorrhoeae
tggaattgagccgccaacgc

SEQ ID NO: 55301 - DNA, 20 bp, Neisseria gonorrhoeae
ggaattgagccgccaacgcc

SEQ ID NO: 55302 - DNA, 20 bp, Neisseria gonorrhoeae
gaattgagccgccaacgcct

SEQ ID NO: 55303 - DNA, 20 bp, Neisseria gonorrhoeae
ctgctgaacgaaaaacgcgc

SEQ ID NO: 55304 - DNA, 20 bp, Neisseria gonorrhoeae
cattgcaaacagctcggcgc

SEQ ID NO: 55305 - DNA, 20 bp, Neisseria gonorrhoeae
caaacagctcggcgcgtttt

SEQ ID NO: 55306 - DNA, 20 bp, Neisseria gonorrhoeae
ttcgttcagcaggaaggtgg

SEQ ID NO: 55307 - DNA, 20 bp, Neisseria gonorrhoeae
tcgttcagcaggaaggtggc

SEQ ID NO: 55308 - DNA, 20 bp, Neisseria gonorrhoeae
cggcaacggcggcggtttcc

SEQ ID NO: 55309 - DNA, 20 bp, Neisseria gonorrhoeae
ggcaacggcggcggtttccg

SEQ ID NO: 55310 - DNA, 20 bp, Neisseria gonorrhoeae
ccggtgcggtttggccacgt

SEQ ID NO: 55311 - DNA, 20 bp, Neisseria gonorrhoeae
cggtgcggtttggccacgtt

SEQ ID NO: 55312 - DNA, 20 bp, Neisseria gonorrhoeae
ggccacgttcgttgcggctg

SEQ ID NO: 55313 - DNA, 20 bp, Neisseria gonorrhoeae
ccgtcagcattgccgatccg

SEQ ID NO: 55314 - DNA, 20 bp, Neisseria gonorrhoeae
ccgatccgctcatcgccaca

SEQ ID NO: 55315 - DNA, 20 bp, Neisseria gonorrhoeae
agacggcatcttccgccgtt

SEQ ID NO: 55316 - DNA, 20 bp, Neisseria gonorrhoeae
gaaacggcggaagatgccgt

SEQ ID NO: 55317 - DNA, 20 bp, Neisseria gonorrhoeae
aaacggcggaagatgccgtc

SEQ ID NO: 55318 - DNA, 20 bp, Neisseria gonorrhoeae
acggctgcggcggaacaggc

SEQ ID NO: 55319 - DNA, 20 bp, Neisseria gonorrhoeae
cggctgcggcggaacaggca

SEQ ID NO: 55320 - DNA, 20 bp, Neisseria gonorrhoeae
cgatcaggacgagtccgccg

SEQ ID NO: 55321 - DNA, 20 bp, Neisseria gonorrhoeae
gatcaggacgagtccgccgg

SEQ ID NO: 55322 - DNA, 20 bp, Neisseria gonorrhoeae
gtgcggtttcccgtgcctgt

SEQ ID NO: 55323 - DNA, 20 bp, Neisseria gonorrhoeae
ccgccaaatcgagcgcggtg

SEQ ID NO: 55324 - DNA, 20 bp, Neisseria gonorrhoeae
atccgcacctccgtcgatca

SEQ ID NO: 55325 - DNA, 20 bp, Neisseria gonorrhoeae
tccgcacctccgtcgatcac

SEQ ID NO: 55326 - DNA, 20 bp, Neisseria gonorrhoeae
ggcggcaaccggcagggcgg

SEQ ID NO: 55327 - DNA, 20 bp, Neisseria gonorrhoeae
gcggcaaccggcagggcgga

SEQ ID NO: 55328 - DNA, 20 bp, Neisseria gonorrhoeae
ttgtccggcaaaatccacat

SEQ ID NO: 55329 - DNA, 20 bp, Neisseria gonorrhoeae
tgtccggcaaaatccacatc

SEQ ID NO: 55330 - DNA, 20 bp, Neisseria gonorrhoeae
gtccggcaaaatccacatcg

SEQ ID NO: 55331 - DNA, 20 bp, Neisseria gonorrhoeae
tccggcaaaatccacatcgg

SEQ ID NO: 55332 - DNA, 20 bp, Neisseria gonorrhoeae
ggaaaactacgaaggcggcc

SEQ ID NO: 55333 - DNA, 20 bp, Neisseria gonorrhoeae
ggacaaaaactcagccgcga

SEQ ID NO: 55334 - DNA, 20 bp, Neisseria gonorrhoeae
gttacgccgcccgaacctcg

SEQ ID NO: 55335 - DNA, 20 bp, Neisseria gonorrhoeae
ttacgccgcccgaacctcga

SEQ ID NO: 55336 - DNA, 20 bp, Neisseria gonorrhoeae
cgccgcccgaacctcgatta

SEQ ID NO: 55337 - DNA, 20 bp, Neisseria gonorrhoeae
cgccgcgctgatgacgctcg

SEQ ID NO: 55338 - DNA, 20 bp, Neisseria gonorrhoeae
ccgcaccggccagcgcgcgg

SEQ ID NO: 55339 - DNA, 20 bp, Neisseria gonorrhoeae
cgcaccggccagcgcgcggt

SEQ ID NO: 55340 - DNA, 20 bp, Neisseria gonorrhoeae
gcacccagcacagcgtatcc

SEQ ID NO: 55341 - DNA, 20 bp, Neisseria gonorrhoeae
gctgcgtaccgccgccgact

SEQ ID NO: 55342 - DNA, 20 bp, Neisseria gonorrhoeae
ctgcgtaccgccgccgactg

SEQ ID NO: 55343 - DNA, 20 bp, Neisseria gonorrhoeae
gccgcgcgatgccagcgaag

SEQ ID NO: 55344 - DNA, 20 bp, Neisseria gonorrhoeae
ccgcgcgatgccagcgaagc

SEQ ID NO: 55345 - DNA, 20 bp, Neisseria gonorrhoeae
accgtcgtcgtcgttttgcc

SEQ ID NO: 55346 - DNA, 20 bp, Neisseria gonorrhoeae
ccgtcgtcgtcgttttgccc

SEQ ID NO: 55347 - DNA, 20 bp, Neisseria gonorrhoeae
tgcccacaccgcccttctga

SEQ ID NO: 55348 - DNA, 20 bp, Neisseria gonorrhoeae
ccgccgccaaactgctgccg

SEQ ID NO: 55349 - DNA, 20 bp, Neisseria gonorrhoeae
cagcggcagcagtttggcgg

SEQ ID NO: 55350 - DNA, 20 bp, Neisseria gonorrhoeae
agcggcagcagtttggcggc

SEQ ID NO: 55351 - DNA, 20 bp, Neisseria gonorrhoeae
ggcggcggcaatggcgatgg

SEQ ID NO: 55352 - DNA, 20 bp, Neisseria gonorrhoeae
gcggcggcaatggcgatggc

SEQ ID NO: 55353 - DNA, 20 bp, Neisseria gonorrhoeae
ggagcagaatatggtcaaaa

SEQ ID NO: 55354 - DNA, 20 bp, Neisseria gonorrhoeae
gagcagaatatggtcaaaat

SEQ ID NO: 55355 - DNA, 20 bp, Neisseria gonorrhoeae
cgcccgatgtggcggcgagg

SEQ ID NO: 55356 - DNA, 20 bp, Neisseria gonorrhoeae
gcccgatgtggcggcgaggt

SEQ ID NO: 55357 - DNA, 20 bp, Neisseria gonorrhoeae
tgaccatgcgtgcgttgatt

SEQ ID NO: 55358 - DNA, 20 bp, Neisseria gonorrhoeae
acactgctccaaaccgacct

SEQ ID NO: 55359 - DNA, 20 bp, Neisseria gonorrhoeae
gttgcaggtcggtttggagc

SEQ ID NO: 55360 - DNA, 20 bp, Neisseria gonorrhoeae
ttgcaggtcggtttggagca

SEQ ID NO: 55361 - DNA, 20 bp, Neisseria gonorrhoeae
caggtcggtttggagcagtg

SEQ ID NO: 55362 - DNA, 20 bp, Neisseria gonorrhoeae
ggagcagtgtgaagtggcgg

SEQ ID NO: 55363 - DNA, 20 bp, Neisseria gonorrhoeae
ctctggctcagcaccaatat

SEQ ID NO: 55364 - DNA, 20 bp, Neisseria gonorrhoeae
ccgccctcgtcatcctgctg

SEQ ID NO: 55365 - DNA, 20 bp, Neisseria gonorrhoeae
cgccctcgtcatcctgctgc

SEQ ID NO: 55366 - DNA, 20 bp, Neisseria gonorrhoeae
gcggcgggtgcgttgcagca

SEQ ID NO: 55367 - DNA, 20 bp, Neisseria gonorrhoeae
cggcgggtgcgttgcagcag

SEQ ID NO: 55368 - DNA, 20 bp, Neisseria gonorrhoeae
gagggcaatatggcggccaa

SEQ ID NO: 55369 - DNA, 20 bp, Neisseria gonorrhoeae
agggcaatatggcggccaaa

SEQ ID NO: 55370 - DNA, 20 bp, Neisseria gonorrhoeae
aaacttgggactgaacccgg

SEQ ID NO: 55371 - DNA, 20 bp, Neisseria gonorrhoeae
ggactgaacccggcagctgt

SEQ ID NO: 55372 - DNA, 20 bp, Neisseria gonorrhoeae
agtcccaagtttgaatcgcg

SEQ ID NO: 55373 - DNA, 20 bp, Neisseria gonorrhoeae
ggtctgggttgccgacgttt

SEQ ID NO: 55374 - DNA, 20 bp, Neisseria gonorrhoeae
gtctgggttgccgacgtttg

SEQ ID NO: 55375 - DNA, 20 bp, Neisseria gonorrhoeae
ccgacgtttgcgcgtatttc

SEQ ID NO: 55376 - DNA, 20 bp, Neisseria gonorrhoeae
gcgcgtatttcagcggcaag

SEQ ID NO: 55377 - DNA, 20 bp, Neisseria gonorrhoeae
cgcgtatttcagcggcaagg

SEQ ID NO: 55378 - DNA, 20 bp, Neisseria gonorrhoeae
aactacctgcccgtcaaagt

SEQ ID NO: 55379 - DNA, 20 bp, Neisseria gonorrhoeae
tgatgatggcactgccgtgt

SEQ ID NO: 55380 - DNA, 20 bp, Neisseria gonorrhoeae
gatgatggcactgccgtgtg

SEQ ID NO: 55381 - DNA, 20 bp, Neisseria gonorrhoeae
atgatggcactgccgtgtgt

SEQ ID NO: 55382 - DNA, 20 bp, Neisseria gonorrhoeae
taggtgtcgccgactttgac

SEQ ID NO: 55383 - DNA, 20 bp, Neisseria gonorrhoeae
ggtaatgctgtgggtgacgg

SEQ ID NO: 55384 - DNA, 20 bp, Neisseria gonorrhoeae
tgtcggcgatttcgatgtgt

SEQ ID NO: 55385 - DNA, 20 bp, Neisseria gonorrhoeae
gtcggcgatttcgatgtgtc

SEQ ID NO: 55386 - DNA, 20 bp, Neisseria gonorrhoeae
tcggcgatttcgatgtgtcc

SEQ ID NO: 55387 - DNA, 20 bp, Neisseria gonorrhoeae
cgatgtgtccgaccgtaccg

SEQ ID NO: 55388 - DNA, 20 bp, Neisseria gonorrhoeae
tggatgtggatgaccgctat

SEQ ID NO: 55389 - DNA, 20 bp, Neisseria gonorrhoeae
ccactgcagtcgccacgccg

SEQ ID NO: 55390 - DNA, 20 bp, Neisseria gonorrhoeae
cccgtaccgatggtggcgga

SEQ ID NO: 55391 - DNA, 20 bp, Neisseria gonorrhoeae
cacgatggacgacgtacgcg

SEQ ID NO: 55392 - DNA, 20 bp, Neisseria gonorrhoeae
acgatggacgacgtacgcgc

SEQ ID NO: 55393 - DNA, 20 bp, Neisseria gonorrhoeae
atacaggcgcacgaacactt

SEQ ID NO: 55394 - DNA, 20 bp, Neisseria gonorrhoeae
ggccacggtttcggcgcgta

SEQ ID NO: 55395 - DNA, 20 bp, Neisseria gonorrhoeae
cggcgcgtacgtcgtccatc

SEQ ID NO: 55396 - DNA, 20 bp, Neisseria gonorrhoeae
ccccgaaaccgacggcggcg

SEQ ID NO: 55397 - DNA, 20 bp, Neisseria gonorrhoeae
cccgaaaccgacggcggcga

SEQ ID NO: 55398 - DNA, 20 bp, Neisseria gonorrhoeae
ttcagacggcattcgggcaa

SEQ ID NO: 55399 - DNA, 20 bp, Neisseria gonorrhoeae
agacggcattcgggcaaatg

SEQ ID NO: 55400 - DNA, 20 bp, Neisseria gonorrhoeae
gcccgaatgccgtctgaaca

SEQ ID NO: 55401 - DNA, 20 bp, Neisseria gonorrhoeae
gcagcctcacaaatcaattt

SEQ ID NO: 55402 - DNA, 20 bp, Neisseria gonorrhoeae
cagcctcacaaatcaattta

SEQ ID NO: 55403 - DNA, 20 bp, Neisseria gonorrhoeae
agcacgagtagcaccaatac

SEQ ID NO: 55404 - DNA, 20 bp, Neisseria gonorrhoeae
gcacgagtagcaccaatacc

SEQ ID NO: 55405 - DNA, 20 bp, Neisseria gonorrhoeae
cgatgtgtgcgttattaggg

SEQ ID NO: 55406 - DNA, 20 bp, Neisseria gonorrhoeae
taaccaatgtaaccctaatc

SEQ ID NO: 55407 - DNA, 20 bp, Neisseria gonorrhoeae
aaccaatgtaaccctaatct

SEQ ID NO: 55408 - DNA, 20 bp, Neisseria gonorrhoeae
accaatgtaaccctaatctt

SEQ ID NO: 55409 - DNA, 20 bp, Neisseria gonorrhoeae
ttttgttcagccatggttaa

SEQ ID NO: 55410 - DNA, 20 bp, Neisseria gonorrhoeae
tttgttcagccatggttaac

SEQ ID NO: 55411 - DNA, 20 bp, Neisseria gonorrhoeae
cagaagcaacttgaacaccg

SEQ ID NO: 55412 - DNA, 20 bp, Neisseria gonorrhoeae
aacaccgaacagcagctcga

SEQ ID NO: 55413 - DNA, 20 bp, Neisseria gonorrhoeae
gatttcaggtttggttgcat

SEQ ID NO: 55414 - DNA, 20 bp, Neisseria gonorrhoeae
atttcaggtttggttgcatt

SEQ ID NO: 55415 - DNA, 20 bp, Neisseria gonorrhoeae
caggtttggttgcatttgcc

SEQ ID NO: 55416 - DNA, 20 bp, Neisseria gonorrhoeae
caccgaccgcactgtttttt

SEQ ID NO: 55417 - DNA, 20 bp, Neisseria gonorrhoeae
accgaccgcactgttttttg

SEQ ID NO: 55418 - DNA, 20 bp, Neisseria gonorrhoeae
tttgattttgttgttttgcc

SEQ ID NO: 55419 - DNA, 20 bp, Neisseria gonorrhoeae
ttgattttgttgttttgcct

SEQ ID NO: 55420 - DNA, 20 bp, Neisseria gonorrhoeae
tgattttgttgttttgcctt

SEQ ID NO: 55421 - DNA, 20 bp, Neisseria gonorrhoeae
ccccttcagacggcatcgca

SEQ ID NO: 55422 - DNA, 20 bp, Neisseria gonorrhoeae
cccttcagacggcatcgcag

SEQ ID NO: 55423 - DNA, 20 bp, Neisseria gonorrhoeae
agacggcatcgcagcccgac

SEQ ID NO: 55424 - DNA, 20 bp, Neisseria gonorrhoeae
acgtcggtagtcgggctgcg

SEQ ID NO: 55425 - DNA, 20 bp, Neisseria gonorrhoeae
gcagaggatgtgccgccggt

SEQ ID NO: 55426 - DNA, 20 bp, Neisseria gonorrhoeae
agttacatccaccagacgac

SEQ ID NO: 55427 - DNA, 20 bp, Neisseria gonorrhoeae
catccaccagacgacgggtc

SEQ ID NO: 55428 - DNA, 20 bp, Neisseria gonorrhoeae
gcggttttcaacgcggtatc

SEQ ID NO: 55429 - DNA, 20 bp, Neisseria gonorrhoeae
tcaacgcggtatccgccaaa

SEQ ID NO: 55430 - DNA, 20 bp, Neisseria gonorrhoeae
caacgcggtatccgccaaac

SEQ ID NO: 55431 - DNA, 20 bp, Neisseria gonorrhoeae
gccgccaaactgagctttac

SEQ ID NO: 55432 - DNA, 20 bp, Neisseria gonorrhoeae
accgcccagaggttgttgag

SEQ ID NO: 55433 - DNA, 20 bp, Neisseria gonorrhoeae
ccgcccagaggttgttgagt

SEQ ID NO: 55434 - DNA, 20 bp, Neisseria gonorrhoeae
ttgagtaaccagactgtacg

SEQ ID NO: 55435 - DNA, 20 bp, Neisseria gonorrhoeae
agtaaccagactgtacgggc

SEQ ID NO: 55436 - DNA, 20 bp, Neisseria gonorrhoeae
agacggcatcggtatcggcg

SEQ ID NO: 55437 - DNA, 20 bp, Neisseria gonorrhoeae
ggcgtgcgctaccgcttctg

SEQ ID NO: 55438 - DNA, 20 bp, Neisseria gonorrhoeae
tgattcgccgataccgatgc

SEQ ID NO: 55439 - DNA, 20 bp, Neisseria gonorrhoeae
gccgataccgatgccgtctg

SEQ ID NO: 55440 - DNA, 20 bp, Neisseria gonorrhoeae
agacggcatttttgatgcgc

SEQ ID NO: 55441 - DNA, 20 bp, Neisseria gonorrhoeae
gcgccccatttctgccgcca

SEQ ID NO: 55442 - DNA, 20 bp, Neisseria gonorrhoeae
ctgccgccaggccggcggta

SEQ ID NO: 55443 - DNA, 20 bp, Neisseria gonorrhoeae
tgccgccaggccggcggtaa

SEQ ID NO: 55444 - DNA, 20 bp, Neisseria gonorrhoeae
gaatccggttcgctgattac

SEQ ID NO: 55445 - DNA, 20 bp, Neisseria gonorrhoeae
gctgattaccgccggcctgg

SEQ ID NO: 55446 - DNA, 20 bp, Neisseria gonorrhoeae
attcgcgcagcggcaggtta

SEQ ID NO: 55447 - DNA, 20 bp, Neisseria gonorrhoeae
gcgcagcggcaggttaaagt

SEQ ID NO: 55448 - DNA, 20 bp, Neisseria gonorrhoeae
aagtcgaacccgcacgccat

SEQ ID NO: 55449 - DNA, 20 bp, Neisseria gonorrhoeae
cgtcggcaggcacgccgcgc

SEQ ID NO: 55450 - DNA, 20 bp, Neisseria gonorrhoeae
ttcggcactggggcgcggcg

SEQ ID NO: 55451 - DNA, 20 bp, Neisseria gonorrhoeae
gccacttcaccccacgcggc

SEQ ID NO: 55452 - DNA, 20 bp, Neisseria gonorrhoeae
accccacgcggcttcttttt

SEQ ID NO: 55453 - DNA, 20 bp, Neisseria gonorrhoeae
tttttgcgcgcgtatcagca

SEQ ID NO: 55454 - DNA, 20 bp, Neisseria gonorrhoeae
ttgcgcgcgtatcagcacgg

SEQ ID NO: 55455 - DNA, 20 bp, Neisseria gonorrhoeae
tgcgcgcgtatcagcacggt

SEQ ID NO: 55456 - DNA, 20 bp, Neisseria gonorrhoeae
gattaccccggtgcgcaccc

SEQ ID NO: 55457 - DNA, 20 bp, Neisseria gonorrhoeae
attaccccggtgcgcacccg

SEQ ID NO: 55458 - DNA, 20 bp, Neisseria gonorrhoeae
ccccggtgcgcacccgttcg

SEQ ID NO: 55459 - DNA, 20 bp, Neisseria gonorrhoeae
gatacagccgctggtggtcg

SEQ ID NO: 55460 - DNA, 20 bp, Neisseria gonorrhoeae
ccgaaatacagcagggcgac

SEQ ID NO: 55461 - DNA, 20 bp, Neisseria gonorrhoeae
agcagcagcggcagcgcgtt

SEQ ID NO: 55462 - DNA, 20 bp, Neisseria gonorrhoeae
gcccactcccacagcgaagg

SEQ ID NO: 55463 - DNA, 20 bp, Neisseria gonorrhoeae
cggatgttggggctggtggc

SEQ ID NO: 55464 - DNA, 20 bp, Neisseria gonorrhoeae
gggctggtggcggtattggc

SEQ ID NO: 55465 - DNA, 20 bp, Neisseria gonorrhoeae
gcgttcagcgcgccttcgct

SEQ ID NO: 55466 - DNA, 20 bp, Neisseria gonorrhoeae
gacggcaccgatgcggtgat

SEQ ID NO: 55467 - DNA, 20 bp, Neisseria gonorrhoeae
cgccgaaaccgccgtcggcg

SEQ ID NO: 55468 - DNA, 20 bp, Neisseria gonorrhoeae
gaaaccgtcagccaaatggc

SEQ ID NO: 55469 - DNA, 20 bp, Neisseria gonorrhoeae
aaaccgtcagccaaatggcg

SEQ ID NO: 55470 - DNA, 20 bp, Neisseria gonorrhoeae
ggctgacggtttcaaacgga

SEQ ID NO: 55471 - DNA, 20 bp, Neisseria gonorrhoeae
tggcaaccagcaccgaccac

SEQ ID NO: 55472 - DNA, 20 bp, Neisseria gonorrhoeae
ggcaaccagcaccgaccacg

SEQ ID NO: 55473 - DNA, 20 bp, Neisseria gonorrhoeae
gcaaccagcaccgaccacga

SEQ ID NO: 55474 - DNA, 20 bp, Neisseria gonorrhoeae
aacgaagtcgaaacgatgct

SEQ ID NO: 55475 - DNA, 20 bp, Neisseria gonorrhoeae
tgttccaccagcatcgtttc

SEQ ID NO: 55476 - DNA, 20 bp, Neisseria gonorrhoeae
caaagtttcacacacgctca

SEQ ID NO: 55477 - DNA, 20 bp, Neisseria gonorrhoeae
cacacacgctcaaaggcgat

SEQ ID NO: 55478 - DNA, 20 bp, Neisseria gonorrhoeae
acacacgctcaaaggcgatg

SEQ ID NO: 55479 - DNA, 20 bp, Neisseria gonorrhoeae
ggcatcgcctttgagcgtgt

SEQ ID NO: 55480 - DNA, 20 bp, Neisseria gonorrhoeae
gagcgtgtgtgaaactttgg

SEQ ID NO: 55481 - DNA, 20 bp, Neisseria gonorrhoeae
gtacggtaagtctgacaata

SEQ ID NO: 55482 - DNA, 20 bp, Neisseria gonorrhoeae
caacagaaagcaattgttgg

SEQ ID NO: 55483 - DNA, 20 bp, Neisseria gonorrhoeae
aacagaaagcaattgttgga

SEQ ID NO: 55484 - DNA, 20 bp, Neisseria gonorrhoeae
ttggaatccggcttgttcaa

SEQ ID NO: 55485 - DNA, 20 bp, Neisseria gonorrhoeae
gaatccggcttgttcaaaac

SEQ ID NO: 55486 - DNA, 20 bp, Neisseria gonorrhoeae
cagcaccttcactttgacca

SEQ ID NO: 55487 - DNA, 20 bp, Neisseria gonorrhoeae
actttgaccacgtcgccggc

SEQ ID NO: 55488 - DNA, 20 bp, Neisseria gonorrhoeae
gaccacgtcgccggctttca

SEQ ID NO: 55489 - DNA, 20 bp, Neisseria gonorrhoeae
accacgtcgccggctttcac

SEQ ID NO: 55490 - DNA, 20 bp, Neisseria gonorrhoeae
caccacgtcgcgcgggtctt

SEQ ID NO: 55491 - DNA, 20 bp, Neisseria gonorrhoeae
ggttcacgtcgtgctgatac

SEQ ID NO: 55492 - DNA, 20 bp, Neisseria gonorrhoeae
gttcacgtcgtgctgatact

SEQ ID NO: 55493 - DNA, 20 bp, Neisseria gonorrhoeae
acgtcgtgctgatactgccc

SEQ ID NO: 55494 - DNA, 20 bp, Neisseria gonorrhoeae
ggggtcgattttgaccaact

SEQ ID NO: 55495 - DNA, 20 bp, Neisseria gonorrhoeae
gggtcgattttgaccaactc

SEQ ID NO: 55496 - DNA, 20 bp, Neisseria gonorrhoeae
ggaaacgacgattttgtgca

SEQ ID NO: 55497 - DNA, 20 bp, Neisseria gonorrhoeae
tgtgcaggctgctttcgggc

SEQ ID NO: 55498 - DNA, 20 bp, Neisseria gonorrhoeae
gtgcaggctgctttcgggca

SEQ ID NO: 55499 - DNA, 20 bp, Neisseria gonorrhoeae
tgcaggctgctttcgggcat

SEQ ID NO: 55500 - DNA, 20 bp, Neisseria gonorrhoeae
cgggcattccgcgcaccagt

SEQ ID NO: 55501 - DNA, 20 bp, Neisseria gonorrhoeae
cagccgctcggcaagctggc

SEQ ID NO: 55502 - DNA, 20 bp, Neisseria gonorrhoeae
tttacggtaacgcgcgataa

SEQ ID NO: 55503 - DNA, 20 bp, Neisseria gonorrhoeae
acggtaacgcgcgataaagg

SEQ ID NO: 55504 - DNA, 20 bp, Neisseria gonorrhoeae
cggtaacgcgcgataaaggg

SEQ ID NO: 55505 - DNA, 20 bp, Neisseria gonorrhoeae
atcgcgcgttaccgtaaaga

SEQ ID NO: 55506 - DNA, 20 bp, Neisseria gonorrhoeae
ccgcaccgataaaacgcact

SEQ ID NO: 55507 - DNA, 20 bp, Neisseria gonorrhoeae
ttccttccacagcttcatcg

SEQ ID NO: 55508 - DNA, 20 bp, Neisseria gonorrhoeae
tccttccacagcttcatcgc

SEQ ID NO: 55509 - DNA, 20 bp, Neisseria gonorrhoeae
ccttccacagcttcatcgca

SEQ ID NO: 55510 - DNA, 20 bp, Neisseria gonorrhoeae
cttccacagcttcatcgcaa

SEQ ID NO: 55511 - DNA, 20 bp, Neisseria gonorrhoeae
gggtttctttggggacggtg

SEQ ID NO: 55512 - DNA, 20 bp, Neisseria gonorrhoeae
ggtttctttggggacggtga

SEQ ID NO: 55513 - DNA, 20 bp, Neisseria gonorrhoeae
ctttggggacggtgagcttg

SEQ ID NO: 55514 - DNA, 20 bp, Neisseria gonorrhoeae
tttggggacggtgagcttga

SEQ ID NO: 55515 - DNA, 20 bp, Neisseria gonorrhoeae
ggggacggtgagcttgactt

SEQ ID NO: 55516 - DNA, 20 bp, Neisseria gonorrhoeae
gggtttcggctgtcgaagga

SEQ ID NO: 55517 - DNA, 20 bp, Neisseria gonorrhoeae
ggtttcggctgtcgaaggaa

SEQ ID NO: 55518 - DNA, 20 bp, Neisseria gonorrhoeae
cggctgtcgaaggaagggct

SEQ ID NO: 55519 - DNA, 20 bp, Neisseria gonorrhoeae
ggctgtcgaaggaagggctt

SEQ ID NO: 55520 - DNA, 20 bp, Neisseria gonorrhoeae
tttgcaaaggtctcagaatg

SEQ ID NO: 55521 - DNA, 20 bp, Neisseria gonorrhoeae
ccccgaggtaacggctgagc

SEQ ID NO: 55522 - DNA, 20 bp, Neisseria gonorrhoeae
gtgctttctgtcgcagccgg

SEQ ID NO: 55523 - DNA, 20 bp, Neisseria gonorrhoeae
ctgtcgcagccggattgtcg

SEQ ID NO: 55524 - DNA, 20 bp, Neisseria gonorrhoeae
tgtcgcagccggattgtcgg

SEQ ID NO: 55525 - DNA, 20 bp, Neisseria gonorrhoeae
tcggtcggtacgctcagccg

SEQ ID NO: 55526 - DNA, 20 bp, Neisseria gonorrhoeae
cccgccggagagaaagaaat

SEQ ID NO: 55527 - DNA, 20 bp, Neisseria gonorrhoeae
ggacagcatggaacgcacca

SEQ ID NO: 55528 - DNA, 20 bp, Neisseria gonorrhoeae
ctttctctccggcggggaat

SEQ ID NO: 55529 - DNA, 20 bp, Neisseria gonorrhoeae
tttctctccggcggggaata

SEQ ID NO: 55530 - DNA, 20 bp, Neisseria gonorrhoeae
ctctccggcggggaatacgt

SEQ ID NO: 55531 - DNA, 20 bp, Neisseria gonorrhoeae
gggcgagctgcatcgcgtat

SEQ ID NO: 55532 - DNA, 20 bp, Neisseria gonorrhoeae
ggcgagctgcatcgcgtatt

SEQ ID NO: 55533 - DNA, 20 bp, Neisseria gonorrhoeae
catactttccctgctgcgga

SEQ ID NO: 55534 - DNA, 20 bp, Neisseria gonorrhoeae
ccctgctgcggacttcgccg

SEQ ID NO: 55535 - DNA, 20 bp, Neisseria gonorrhoeae
cctgctgcggacttcgccga

SEQ ID NO: 55536 - DNA, 20 bp, Neisseria gonorrhoeae
accgccgcctccatcgtctg

SEQ ID NO: 55537 - DNA, 20 bp, Neisseria gonorrhoeae
ccgccgcctccatcgtctgg

SEQ ID NO: 55538 - DNA, 20 bp, Neisseria gonorrhoeae
gtactcggcatcatcgccgg

SEQ ID NO: 55539 - DNA, 20 bp, Neisseria gonorrhoeae
ggttcgcctagctgccagac

SEQ ID NO: 55540 - DNA, 20 bp, Neisseria gonorrhoeae
gcctagctgccagacgatgg

SEQ ID NO: 55541 - DNA, 20 bp, Neisseria gonorrhoeae
atgattttatgcggcaccgt

SEQ ID NO: 55542 - DNA, 20 bp, Neisseria gonorrhoeae
tatgcggcaccgtactgtac

SEQ ID NO: 55543 - DNA, 20 bp, Neisseria gonorrhoeae
atgcggcaccgtactgtaca

SEQ ID NO: 55544 - DNA, 20 bp, Neisseria gonorrhoeae
tgcggcaccgtactgtacag

SEQ ID NO: 55545 - DNA, 20 bp, Neisseria gonorrhoeae
caaatcatcctgccccaccg

SEQ ID NO: 55546 - DNA, 20 bp, Neisseria gonorrhoeae
cagacggcaacgacagtccc

SEQ ID NO: 55547 - DNA, 20 bp, Neisseria gonorrhoeae
agacggcaacgacagtcccg

SEQ ID NO: 55548 - DNA, 20 bp, Neisseria gonorrhoeae
tcgacaacctcggcagcgtc

SEQ ID NO: 55549 - DNA, 20 bp, Neisseria gonorrhoeae
tcgagaaggcggctcaggtg

SEQ ID NO: 55550 - DNA, 20 bp, Neisseria gonorrhoeae
ccgtctgaaaggaggcgcag

SEQ ID NO: 55551 - DNA, 20 bp, Neisseria gonorrhoeae
cgccatgccgtccgcctgtc

SEQ ID NO: 55552 - DNA, 20 bp, Neisseria gonorrhoeae
gaggttcagctgcggacgga

SEQ ID NO: 55553 - DNA, 20 bp, Neisseria gonorrhoeae
agctgcggacggattgcctg

SEQ ID NO: 55554 - DNA, 20 bp, Neisseria gonorrhoeae
cgccgagtacggtgccggcg

SEQ ID NO: 55555 - DNA, 20 bp, Neisseria gonorrhoeae
gtacacgcggcttttggtgg

SEQ ID NO: 55556 - DNA, 20 bp, Neisseria gonorrhoeae
accctgctcaaaaccggcta

SEQ ID NO: 55557 - DNA, 20 bp, Neisseria gonorrhoeae
ccctgctcaaaaccggctac

SEQ ID NO: 55558 - DNA, 20 bp, Neisseria gonorrhoeae
ttcgtgcatttcgctgcggt

SEQ ID NO: 55559 - DNA, 20 bp, Neisseria gonorrhoeae
gtgcatttcgctgcggtatg

SEQ ID NO: 55560 - DNA, 20 bp, Neisseria gonorrhoeae
cgctgcggtatgcgccgagg

SEQ ID NO: 55561 - DNA, 20 bp, Neisseria gonorrhoeae
cagacggcattggatacact

SEQ ID NO: 55562 - DNA, 20 bp, Neisseria gonorrhoeae
agacggcattggatacactg

SEQ ID NO: 55563 - DNA, 20 bp, Neisseria gonorrhoeae
gatacactgcgcggcgaact

SEQ ID NO: 55564 - DNA, 20 bp, Neisseria gonorrhoeae
gagctgttggaggaggatgt

SEQ ID NO: 55565 - DNA, 20 bp, Neisseria gonorrhoeae
gaggaggatgtggctttgtg

SEQ ID NO: 55566 - DNA, 20 bp, Neisseria gonorrhoeae
tatagcggattaacaaaaac

SEQ ID NO: 55567 - DNA, 20 bp, Neisseria gonorrhoeae
atagcggattaacaaaaacc

SEQ ID NO: 55568 - DNA, 20 bp, Neisseria gonorrhoeae
tagcggattaacaaaaaccg

SEQ ID NO: 55569 - DNA, 20 bp, Neisseria gonorrhoeae
acaaaaaccggtacggcgtt

SEQ ID NO: 55570 - DNA, 20 bp, Neisseria gonorrhoeae
ccccgccccggctcaaaggg

SEQ ID NO: 55571 - DNA, 20 bp, Neisseria gonorrhoeae
gcccgctgtgtttcgtcgtt

SEQ ID NO: 55572 - DNA, 20 bp, Neisseria gonorrhoeae
cgtcgttcaaagaacagcgc

SEQ ID NO: 55573 - DNA, 20 bp, Neisseria gonorrhoeae
gtcgttcaaagaacagcgcg

SEQ ID NO: 55574 - DNA, 20 bp, Neisseria gonorrhoeae
aaagaacagcgcgtgcagac

SEQ ID NO: 55575 - DNA, 20 bp, Neisseria gonorrhoeae
gcccgaaccgccacgcccgt

SEQ ID NO: 55576 - DNA, 20 bp, Neisseria gonorrhoeae
cccaagccgcgcccgtcgcc

SEQ ID NO: 55577 - DNA, 20 bp, Neisseria gonorrhoeae
atggcgggcgaactcgacgc

SEQ ID NO: 55578 - DNA, 20 bp, Neisseria gonorrhoeae
gggcaaagccttgaaacagc

SEQ ID NO: 55579 - DNA, 20 bp, Neisseria gonorrhoeae
ggcaaagccttgaaacagcc

SEQ ID NO: 55580 - DNA, 20 bp, Neisseria gonorrhoeae
caaggctttgcccaaagcgt

SEQ ID NO: 55581 - DNA, 20 bp, Neisseria gonorrhoeae
gccgccgatgccgaagcggt

SEQ ID NO: 55582 - DNA, 20 bp, Neisseria gonorrhoeae
ccgccgatgccgaagcggtg

SEQ ID NO: 55583 - DNA, 20 bp, Neisseria gonorrhoeae
ccgaagacgagatgattttg

SEQ ID NO: 55584 - DNA, 20 bp, Neisseria gonorrhoeae
tggacatcggcccgaaatcc

SEQ ID NO: 55585 - DNA, 20 bp, Neisseria gonorrhoeae
ggacatcggcccgaaatccg

SEQ ID NO: 55586 - DNA, 20 bp, Neisseria gonorrhoeae
tgagggtaagcagtgtgccg

SEQ ID NO: 55587 - DNA, 20 bp, Neisseria gonorrhoeae
gcgcagaagctgtttgagtg

SEQ ID NO: 55588 - DNA, 20 bp, Neisseria gonorrhoeae
gagtgcggagcgcgcggatt

SEQ ID NO: 55589 - DNA, 20 bp, Neisseria gonorrhoeae
agtgcggagcgcgcggattc

SEQ ID NO: 55590 - DNA, 20 bp, Neisseria gonorrhoeae
tgcgccaacccttcggcaca

SEQ ID NO: 55591 - DNA, 20 bp, Neisseria gonorrhoeae
gtcaaaggcgaaatctccat

SEQ ID NO: 55592 - DNA, 20 bp, Neisseria gonorrhoeae
ttgcccgcgccgacggtacg

SEQ ID NO: 55593 - DNA, 20 bp, Neisseria gonorrhoeae
cccgcgccgacggtacgccg

SEQ ID NO: 55594 - DNA, 20 bp, Neisseria gonorrhoeae
taggtcggcgtaccgtcggc

SEQ ID NO: 55595 - DNA, 20 bp, Neisseria gonorrhoeae
gttggggatggagatttcgc

SEQ ID NO: 55596 - DNA, 20 bp, Neisseria gonorrhoeae
gagggtttcggcaactggca

SEQ ID NO: 55597 - DNA, 20 bp, Neisseria gonorrhoeae
agggtttcggcaactggcag

SEQ ID NO: 55598 - DNA, 20 bp, Neisseria gonorrhoeae
cggcaactggcagggtttcg

SEQ ID NO: 55599 - DNA, 20 bp, Neisseria gonorrhoeae
ggcaactggcagggtttcgg

SEQ ID NO: 55600 - DNA, 20 bp, Neisseria gonorrhoeae
cggggaaaacggctttaagg

SEQ ID NO: 55601 - DNA, 20 bp, Neisseria gonorrhoeae
cgatgcgcacgactttgcgc

SEQ ID NO: 55602 - DNA, 20 bp, Neisseria gonorrhoeae
gcgctccaccggccctttgc

SEQ ID NO: 55603 - DNA, 20 bp, Neisseria gonorrhoeae
cgctccaccggccctttgcc

SEQ ID NO: 55604 - DNA, 20 bp, Neisseria gonorrhoeae
gcccgcgccgacttcgccga

SEQ ID NO: 55605 - DNA, 20 bp, Neisseria gonorrhoeae
cccgcgccgacttcgccgac

SEQ ID NO: 55606 - DNA, 20 bp, Neisseria gonorrhoeae
gaatacttcgcaggcaaaat

SEQ ID NO: 55607 - DNA, 20 bp, Neisseria gonorrhoeae
gcaggcaaaatctaaggctt

SEQ ID NO: 55608 - DNA, 20 bp, Neisseria gonorrhoeae
aacaaacctgtggataagta

SEQ ID NO: 55609 - DNA, 20 bp, Neisseria gonorrhoeae
cgttcagacggcattgttta

SEQ ID NO: 55610 - DNA, 20 bp, Neisseria gonorrhoeae
agacggcattgtttatctgt

SEQ ID NO: 55611 - DNA, 20 bp, Neisseria gonorrhoeae
gggaaacgaggctgaaaaag

SEQ ID NO: 55612 - DNA, 20 bp, Neisseria gonorrhoeae
cagacgggctgccgtttacc

SEQ ID NO: 55613 - DNA, 20 bp, Neisseria gonorrhoeae
accatagtgtgcgctaaaat

SEQ ID NO: 55614 - DNA, 20 bp, Neisseria gonorrhoeae
ccatagtgtgcgctaaaatg

SEQ ID NO: 55615 - DNA, 20 bp, Neisseria gonorrhoeae
attttagcgcacactatggt

SEQ ID NO: 55616 - DNA, 20 bp, Neisseria gonorrhoeae
ataccgataccgatccgatt

SEQ ID NO: 55617 - DNA, 20 bp, Neisseria gonorrhoeae
taccgataccgatccgatta

SEQ ID NO: 55618 - DNA, 20 bp, Neisseria gonorrhoeae
aaacaggcgttcaagtttcg

SEQ ID NO: 55619 - DNA, 20 bp, Neisseria gonorrhoeae
aagtttcggctattgcaaaa

SEQ ID NO: 55620 - DNA, 20 bp, Neisseria gonorrhoeae
cggctattgcaaaaaatgtg

SEQ ID NO: 55621 - DNA, 20 bp, Neisseria gonorrhoeae
cgacattagccaaagcactc

SEQ ID NO: 55622 - DNA, 20 bp, Neisseria gonorrhoeae
gccaaagcactcggtaagtt

SEQ ID NO: 55623 - DNA, 20 bp, Neisseria gonorrhoeae
gcgcatttgaaaaaaaggcc

SEQ ID NO: 55624 - DNA, 20 bp, Neisseria gonorrhoeae
gaaaaaaaggccgcaacaca

SEQ ID NO: 55625 - DNA, 20 bp, Neisseria gonorrhoeae
aaaaaaaggccgcaacacaa

SEQ ID NO: 55626 - DNA, 20 bp, Neisseria gonorrhoeae
tgatggcggttgcaagtgcg

SEQ ID NO: 55627 - DNA, 20 bp, Neisseria gonorrhoeae
gatggcggttgcaagtgcgg

SEQ ID NO: 55628 - DNA, 20 bp, Neisseria gonorrhoeae
atggcggttgcaagtgcggc

SEQ ID NO: 55629 - DNA, 20 bp, Neisseria gonorrhoeae
caagtgcggcgatgagggtg

SEQ ID NO: 55630 - DNA, 20 bp, Neisseria gonorrhoeae
tgccctgtccttttgaaagc

SEQ ID NO: 55631 - DNA, 20 bp, Neisseria gonorrhoeae
gggcgggacaggatgcggta

SEQ ID NO: 55632 - DNA, 20 bp, Neisseria gonorrhoeae
gtcgaacaccgcgccgatat

SEQ ID NO: 55633 - DNA, 20 bp, Neisseria gonorrhoeae
tcgaacaccgcgccgatatc

SEQ ID NO: 55634 - DNA, 20 bp, Neisseria gonorrhoeae
tccatgctgaccgtgccgga

SEQ ID NO: 55635 - DNA, 20 bp, Neisseria gonorrhoeae
ccatgctgaccgtgccggag

SEQ ID NO: 55636 - DNA, 20 bp, Neisseria gonorrhoeae
aatgcgcccaagtcgggaag

SEQ ID NO: 55637 - DNA, 20 bp, Neisseria gonorrhoeae
gccatattgccgccgaaggc

SEQ ID NO: 55638 - DNA, 20 bp, Neisseria gonorrhoeae
ccatattgccgccgaaggcg

SEQ ID NO: 55639 - DNA, 20 bp, Neisseria gonorrhoeae
ggcggcaatatggcaaatac

SEQ ID NO: 55640 - DNA, 20 bp, Neisseria gonorrhoeae
cagcctcccttcccgacttg

SEQ ID NO: 55641 - DNA, 20 bp, Neisseria gonorrhoeae
tcagggaaaatgcgttcaaa

SEQ ID NO: 55642 - DNA, 20 bp, Neisseria gonorrhoeae
cagggaaaatgcgttcaaac

SEQ ID NO: 55643 - DNA, 20 bp, Neisseria gonorrhoeae
agggaaaatgcgttcaaacc

SEQ ID NO: 55644 - DNA, 20 bp, Neisseria gonorrhoeae
aaacccaaagcctgcccgcc

SEQ ID NO: 55645 - DNA, 20 bp, Neisseria gonorrhoeae
gccggctgatattgaggtag

SEQ ID NO: 55646 - DNA, 20 bp, Neisseria gonorrhoeae
atatcggcgcgcatcgggcg

SEQ ID NO: 55647 - DNA, 20 bp, Neisseria gonorrhoeae
tgtcgggcgagcctttgagg

SEQ ID NO: 55648 - DNA, 20 bp, Neisseria gonorrhoeae
taccctcaaaggctcgcccg

SEQ ID NO: 55649 - DNA, 20 bp, Neisseria gonorrhoeae
accctcaaaggctcgcccga

SEQ ID NO: 55650 - DNA, 20 bp, Neisseria gonorrhoeae
ccctcaaaggctcgcccgac

SEQ ID NO: 55651 - DNA, 20 bp, Neisseria gonorrhoeae
agcaggcggtctttaaacag

SEQ ID NO: 55652 - DNA, 20 bp, Neisseria gonorrhoeae
aaacagctcgagatagcctt

SEQ ID NO: 55653 - DNA, 20 bp, Neisseria gonorrhoeae
aacagctcgagatagccttg

SEQ ID NO: 55654 - DNA, 20 bp, Neisseria gonorrhoeae
cgcggtcaggctgccttccc

SEQ ID NO: 55655 - DNA, 20 bp, Neisseria gonorrhoeae
aaagaccgcctgctcaagct

SEQ ID NO: 55656 - DNA, 20 bp, Neisseria gonorrhoeae
gaggttttgggaggaaatgt

SEQ ID NO: 55657 - DNA, 20 bp, Neisseria gonorrhoeae
aggttttgggaggaaatgtt

SEQ ID NO: 55658 - DNA, 20 bp, Neisseria gonorrhoeae
tgggaggaaatgtttacgcc

SEQ ID NO: 55659 - DNA, 20 bp, Neisseria gonorrhoeae
gggaggaaatgtttacgccg

SEQ ID NO: 55660 - DNA, 20 bp, Neisseria gonorrhoeae
ggaggaaatgtttacgccga

SEQ ID NO: 55661 - DNA, 20 bp, Neisseria gonorrhoeae
tttgttttcgggcgtgaaga

SEQ ID NO: 55662 - DNA, 20 bp, Neisseria gonorrhoeae
ttgttttcgggcgtgaagaa

SEQ ID NO: 55663 - DNA, 20 bp, Neisseria gonorrhoeae
tgttttcgggcgtgaagaaa

SEQ ID NO: 55664 - DNA, 20 bp, Neisseria gonorrhoeae
gttttcgggcgtgaagaaat

SEQ ID NO: 55665 - DNA, 20 bp, Neisseria gonorrhoeae
ttttcgggcgtgaagaaata

SEQ ID NO: 55666 - DNA, 20 bp, Neisseria gonorrhoeae
cccaaatcgacatccgagcc

SEQ ID NO: 55667 - DNA, 20 bp, Neisseria gonorrhoeae
tccggccttctgcgagaaat

SEQ ID NO: 55668 - DNA, 20 bp, Neisseria gonorrhoeae
ccggccttctgcgagaaatt

SEQ ID NO: 55669 - DNA, 20 bp, Neisseria gonorrhoeae
cggccttctgcgagaaattc

SEQ ID NO: 55670 - DNA, 20 bp, Neisseria gonorrhoeae
tgcgagaaattccgccccca

SEQ ID NO: 55671 - DNA, 20 bp, Neisseria gonorrhoeae
ttgctgaaaatgccggggaa

SEQ ID NO: 55672 - DNA, 20 bp, Neisseria gonorrhoeae
ctgaaaatgccggggaaggg

SEQ ID NO: 55673 - DNA, 20 bp, Neisseria gonorrhoeae
cgtcctgcgtatcggtttgc

SEQ ID NO: 55674 - DNA, 20 bp, Neisseria gonorrhoeae
gcggcgcaccgcccgctgcc

SEQ ID NO: 55675 - DNA, 20 bp, Neisseria gonorrhoeae
cggcgcaccgcccgctgcct

SEQ ID NO: 55676 - DNA, 20 bp, Neisseria gonorrhoeae
tccatactagtaggtgctcc

SEQ ID NO: 55677 - DNA, 20 bp, Neisseria gonorrhoeae
acaacatcaaccctgtcgcc

SEQ ID NO: 55678 - DNA, 20 bp, Neisseria gonorrhoeae
gcgacagggttgatgttgtt

SEQ ID NO: 55679 - DNA, 20 bp, Neisseria gonorrhoeae
atgttgttaatatgcctgat

SEQ ID NO: 55680 - DNA, 20 bp, Neisseria gonorrhoeae
ttaatatgcctgatggagca

SEQ ID NO: 55681 - DNA, 20 bp, Neisseria gonorrhoeae
gatgtgcatcatgaaacggg

SEQ ID NO: 55682 - DNA, 20 bp, Neisseria gonorrhoeae
gcgcgaggcggtttgcgatg

SEQ ID NO: 55683 - DNA, 20 bp, Neisseria gonorrhoeae
cgcgaggcggtttgcgatgg

SEQ ID NO: 55684 - DNA, 20 bp, Neisseria gonorrhoeae
gcgatggggaggtttggaag

SEQ ID NO: 55685 - DNA, 20 bp, Neisseria gonorrhoeae
cgatggggaggtttggaagc

SEQ ID NO: 55686 - DNA, 20 bp, Neisseria gonorrhoeae
ttgtacaaccgaataacctg

SEQ ID NO: 55687 - DNA, 20 bp, Neisseria gonorrhoeae
tacaaccgaataacctgcat

SEQ ID NO: 55688 - DNA, 20 bp, Neisseria gonorrhoeae
tcggcaacctgctggcaggc

SEQ ID NO: 55689 - DNA, 20 bp, Neisseria gonorrhoeae
cggcaacctgctggcaggcg

SEQ ID NO: 55690 - DNA, 20 bp, Neisseria gonorrhoeae
ggcaacctgctggcaggcgt

SEQ ID NO: 55691 - DNA, 20 bp, Neisseria gonorrhoeae
ggatgaggcggcgtggtggt

SEQ ID NO: 55692 - DNA, 20 bp, Neisseria gonorrhoeae
gggttgggcggcatcttgtc

SEQ ID NO: 55693 - DNA, 20 bp, Neisseria gonorrhoeae
ggcggcatcttgtccgacgg

SEQ ID NO: 55694 - DNA, 20 bp, Neisseria gonorrhoeae
tccgacggcgccgtttggca

SEQ ID NO: 55695 - DNA, 20 bp, Neisseria gonorrhoeae
ggcagccagaattcggtttc

SEQ ID NO: 55696 - DNA, 20 bp, Neisseria gonorrhoeae
ggggcgtgtagcctttggtt

SEQ ID NO: 55697 - DNA, 20 bp, Neisseria gonorrhoeae
gggcgtgtagcctttggttt

SEQ ID NO: 55698 - DNA, 20 bp, Neisseria gonorrhoeae
ggtttggttgttttggcgca

SEQ ID NO: 55699 - DNA, 20 bp, Neisseria gonorrhoeae
gtttggttgttttggcgcag

SEQ ID NO: 55700 - DNA, 20 bp, Neisseria gonorrhoeae
ggttgttttggcgcaggtag

SEQ ID NO: 55701 - DNA, 20 bp, Neisseria gonorrhoeae
tcctgaatgcgggcggtgcg

SEQ ID NO: 55702 - DNA, 20 bp, Neisseria gonorrhoeae
cctgaatgcgggcggtgcgc

SEQ ID NO: 55703 - DNA, 20 bp, Neisseria gonorrhoeae
ctgaatgcgggcggtgcgcg

SEQ ID NO: 55704 - DNA, 20 bp, Neisseria gonorrhoeae
agcagaacgtcggtgtcttt

SEQ ID NO: 55705 - DNA, 20 bp, Neisseria gonorrhoeae
tgctcaacgtcccccatccg

SEQ ID NO: 55706 - DNA, 20 bp, Neisseria gonorrhoeae
ccgacctcacctaccacgga

SEQ ID NO: 55707 - DNA, 20 bp, Neisseria gonorrhoeae
ggcaacatccacttcaaatc

SEQ ID NO: 55708 - DNA, 20 bp, Neisseria gonorrhoeae
acggaggatttgaagtggat

SEQ ID NO: 55709 - DNA, 20 bp, Neisseria gonorrhoeae
gaagtggatgttgcccaagc

SEQ ID NO: 55710 - DNA, 20 bp, Neisseria gonorrhoeae
aagtggatgttgcccaagcc

SEQ ID NO: 55711 - DNA, 20 bp, Neisseria gonorrhoeae
ttaggcatgcccaacgccgg

SEQ ID NO: 55712 - DNA, 20 bp, Neisseria gonorrhoeae
ggcatgcccaacgccggcaa

SEQ ID NO: 55713 - DNA, 20 bp, Neisseria gonorrhoeae
ccgccgtctccgccgcacgc

SEQ ID NO: 55714 - DNA, 20 bp, Neisseria gonorrhoeae
gcgattttggggcgtgcggc

SEQ ID NO: 55715 - DNA, 20 bp, Neisseria gonorrhoeae
tggggcgtgcggcggagacg

SEQ ID NO: 55716 - DNA, 20 bp, Neisseria gonorrhoeae
ctcaaacacctatcacgcac

SEQ ID NO: 55717 - DNA, 20 bp, Neisseria gonorrhoeae
cacgttgtcgatttggcacc

SEQ ID NO: 55718 - DNA, 20 bp, Neisseria gonorrhoeae
tcgatttggcacccttcgac

SEQ ID NO: 55719 - DNA, 20 bp, Neisseria gonorrhoeae
gtcgaagggtgccaaatcga

SEQ ID NO: 55720 - DNA, 20 bp, Neisseria gonorrhoeae
gaggaagcggtggccgaggc

SEQ ID NO: 55721 - DNA, 20 bp, Neisseria gonorrhoeae
tacatggtggagcaaccgcg

SEQ ID NO: 55722 - DNA, 20 bp, Neisseria gonorrhoeae
cgcatacgcctgcccgcggt

SEQ ID NO: 55723 - DNA, 20 bp, Neisseria gonorrhoeae
gcatacgcctgcccgcggtt

SEQ ID NO: 55724 - DNA, 20 bp, Neisseria gonorrhoeae
ctccaccatgtataacccgg

SEQ ID NO: 55725 - DNA, 20 bp, Neisseria gonorrhoeae
gtcgccgacggtgaacgcgc

SEQ ID NO: 55726 - DNA, 20 bp, Neisseria gonorrhoeae
gccgcccatgcccagtttgc

SEQ ID NO: 55727 - DNA, 20 bp, Neisseria gonorrhoeae
gcggatgcgtccgacaggga

SEQ ID NO: 55728 - DNA, 20 bp, Neisseria gonorrhoeae
cggatgcgtccgacagggac

SEQ ID NO: 55729 - DNA, 20 bp, Neisseria gonorrhoeae
accgtcggcgaccaactttt

SEQ ID NO: 55730 - DNA, 20 bp, Neisseria gonorrhoeae
gcgcatatttttcgcgcccg

SEQ ID NO: 55731 - DNA, 20 bp, Neisseria gonorrhoeae
ttcgcgcccgcgccggaagc

SEQ ID NO: 55732 - DNA, 20 bp, Neisseria gonorrhoeae
tcgcgcccgcgccggaagcg

SEQ ID NO: 55733 - DNA, 20 bp, Neisseria gonorrhoeae
cgcgcccgcgccggaagcgg

SEQ ID NO: 55734 - DNA, 20 bp, Neisseria gonorrhoeae
gcgcccgcgccggaagcggc

SEQ ID NO: 55735 - DNA, 20 bp, Neisseria gonorrhoeae
atcggcaagattttcggtcg

SEQ ID NO: 55736 - DNA, 20 bp, Neisseria gonorrhoeae
tcggtcgcactgtggcagac

SEQ ID NO: 55737 - DNA, 20 bp, Neisseria gonorrhoeae
cggtcgcactgtggcagacc

SEQ ID NO: 55738 - DNA, 20 bp, Neisseria gonorrhoeae
ggtcgcactgtggcagaccg

SEQ ID NO: 55739 - DNA, 20 bp, Neisseria gonorrhoeae
ccgatgaagttgccgccgcc

SEQ ID NO: 55740 - DNA, 20 bp, Neisseria gonorrhoeae
gcgcgtgaggcggacatgaa

SEQ ID NO: 55741 - DNA, 20 bp, Neisseria gonorrhoeae
ttggcagcagatgccggcgc

SEQ ID NO: 55742 - DNA, 20 bp, Neisseria gonorrhoeae
tggcagcagatgccggcgca

SEQ ID NO: 55743 - DNA, 20 bp, Neisseria gonorrhoeae
ggcagcagatgccggcgcat

SEQ ID NO: 55744 - DNA, 20 bp, Neisseria gonorrhoeae
gcagcagatgccggcgcata

SEQ ID NO: 55745 - DNA, 20 bp, Neisseria gonorrhoeae
cggctgggcgtttgaccggc

SEQ ID NO: 55746 - DNA, 20 bp, Neisseria gonorrhoeae
ggctgggcgtttgaccggcc

SEQ ID NO: 55747 - DNA, 20 bp, Neisseria gonorrhoeae
gaccggccgcagtatgagtt

SEQ ID NO: 55748 - DNA, 20 bp, Neisseria gonorrhoeae
accggccgcagtatgagttg

SEQ ID NO: 55749 - DNA, 20 bp, Neisseria gonorrhoeae
ggttcgctgtcgcctgttgc

SEQ ID NO: 55750 - DNA, 20 bp, Neisseria gonorrhoeae
ccgtgccgaagcggcgggat

SEQ ID NO: 55751 - DNA, 20 bp, Neisseria gonorrhoeae
cgtgccgaagcggcgggatt

SEQ ID NO: 55752 - DNA, 20 bp, Neisseria gonorrhoeae
ggaacgttttttgctgttgg

SEQ ID NO: 55753 - DNA, 20 bp, Neisseria gonorrhoeae
tttgctgttggacggcggga

SEQ ID NO: 55754 - DNA, 20 bp, Neisseria gonorrhoeae
ttgctgttggacggcgggaa

SEQ ID NO: 55755 - DNA, 20 bp, Neisseria gonorrhoeae
ccgatgccggattcggcggg

SEQ ID NO: 55756 - DNA, 20 bp, Neisseria gonorrhoeae
ggcggggcgcatattgtcga

SEQ ID NO: 55757 - DNA, 20 bp, Neisseria gonorrhoeae
tcgaacactttgccgaagcc

SEQ ID NO: 55758 - DNA, 20 bp, Neisseria gonorrhoeae
gccgaagccgacaggcagga

SEQ ID NO: 55759 - DNA, 20 bp, Neisseria gonorrhoeae
ccgaagccgacaggcaggac

SEQ ID NO: 55760 - DNA, 20 bp, Neisseria gonorrhoeae
gtgcctgtcggaaagaagcc

SEQ ID NO: 55761 - DNA, 20 bp, Neisseria gonorrhoeae
gaacaaccgtccgatttggt

SEQ ID NO: 55762 - DNA, 20 bp, Neisseria gonorrhoeae
aacaaccgtccgatttggtg

SEQ ID NO: 55763 - DNA, 20 bp, Neisseria gonorrhoeae
ggtgcggacagggttgccat

SEQ ID NO: 55764 - DNA, 20 bp, Neisseria gonorrhoeae
gtgcggacagggttgccatt

SEQ ID NO: 55765 - DNA, 20 bp, Neisseria gonorrhoeae
acggggtcgccgctgcgtga

SEQ ID NO: 55766 - DNA, 20 bp, Neisseria gonorrhoeae
agcaatacgccgtcaaaacc

SEQ ID NO: 55767 - DNA, 20 bp, Neisseria gonorrhoeae
catcacttgcgccgcctgcg

SEQ ID NO: 55768 - DNA, 20 bp, Neisseria gonorrhoeae
tgacggcgtattgctgaaca

SEQ ID NO: 55769 - DNA, 20 bp, Neisseria gonorrhoeae
gacggcgtattgctgaacac

SEQ ID NO: 55770 - DNA, 20 bp, Neisseria gonorrhoeae
ggtcgtggtctggaaaatcg

SEQ ID NO: 55771 - DNA, 20 bp, Neisseria gonorrhoeae
gtcgtggtctggaaaatcgc

SEQ ID NO: 55772 - DNA, 20 bp, Neisseria gonorrhoeae
ggcgacggagtgcgtactca

SEQ ID NO: 55773 - DNA, 20 bp, Neisseria gonorrhoeae
ggtttgagtacgcactccgt

SEQ ID NO: 55774 - DNA, 20 bp, Neisseria gonorrhoeae
gagtacgcactccgtcgccg

SEQ ID NO: 55775 - DNA, 20 bp, Neisseria gonorrhoeae
gccgcgtatgccgcgcaagg

SEQ ID NO: 55776 - DNA, 20 bp, Neisseria gonorrhoeae
gttccacgcggttttcgcgc

SEQ ID NO: 55777 - DNA, 20 bp, Neisseria gonorrhoeae
cacgcggttttcgcgccgta

SEQ ID NO: 55778 - DNA, 20 bp, Neisseria gonorrhoeae
tcgcgccgtagccccggcag

SEQ ID NO: 55779 - DNA, 20 bp, Neisseria gonorrhoeae
cgcgccgtagccccggcagt

SEQ ID NO: 55780 - DNA, 20 bp, Neisseria gonorrhoeae
tcctgcccgtgccacacaat

SEQ ID NO: 55781 - DNA, 20 bp, Neisseria gonorrhoeae
tcctgcatcatcgtgagcgt

SEQ ID NO: 55782 - DNA, 20 bp, Neisseria gonorrhoeae
cctgcatcatcgtgagcgtg

SEQ ID NO: 55783 - DNA, 20 bp, Neisseria gonorrhoeae
ctgcatcatcgtgagcgtgt

SEQ ID NO: 55784 - DNA, 20 bp, Neisseria gonorrhoeae
agacggcatcggatgccgcg

SEQ ID NO: 55785 - DNA, 20 bp, Neisseria gonorrhoeae
ccgcaaacgggcggcgtgct

SEQ ID NO: 55786 - DNA, 20 bp, Neisseria gonorrhoeae
gcgcgtgtagtcggcggcca

SEQ ID NO: 55787 - DNA, 20 bp, Neisseria gonorrhoeae
gactgccgttccgaaggtca

SEQ ID NO: 55788 - DNA, 20 bp, Neisseria gonorrhoeae
ggaacggcagtcgaactgtc

SEQ ID NO: 55789 - DNA, 20 bp, Neisseria gonorrhoeae
cctggctgccgctggccgcc

SEQ ID NO: 55790 - DNA, 20 bp, Neisseria gonorrhoeae
cggcaatcgataccgccgcg

SEQ ID NO: 55791 - DNA, 20 bp, Neisseria gonorrhoeae
ggcaatcgataccgccgcgc

SEQ ID NO: 55792 - DNA, 20 bp, Neisseria gonorrhoeae
ggttcggcgcggcggtatcg

SEQ ID NO: 55793 - DNA, 20 bp, Neisseria gonorrhoeae
gttcggcgcggcggtatcga

SEQ ID NO: 55794 - DNA, 20 bp, Neisseria gonorrhoeae
ggcgcggcggtatcgattgc

SEQ ID NO: 55795 - DNA, 20 bp, Neisseria gonorrhoeae
gacctgcgaatacgatatgg

SEQ ID NO: 55796 - DNA, 20 bp, Neisseria gonorrhoeae
acctgcgaatacgatatggt

SEQ ID NO: 55797 - DNA, 20 bp, Neisseria gonorrhoeae
acctcgcccgtctggacggc

SEQ ID NO: 55798 - DNA, 20 bp, Neisseria gonorrhoeae
cctcgcccgtctggacggca

SEQ ID NO: 55799 - DNA, 20 bp, Neisseria gonorrhoeae
aggcgcaccatcgggcggat

SEQ ID NO: 55800 - DNA, 20 bp, Neisseria gonorrhoeae
gaacgcgtcggactgctaga

SEQ ID NO: 55801 - DNA, 20 bp, Neisseria gonorrhoeae
ccggcggtcagaaacagcgc

SEQ ID NO: 55802 - DNA, 20 bp, Neisseria gonorrhoeae
cggcggtcagaaacagcgca

SEQ ID NO: 55803 - DNA, 20 bp, Neisseria gonorrhoeae
ctgaccgccggaaagttcgc

SEQ ID NO: 55804 - DNA, 20 bp, Neisseria gonorrhoeae
tgaccgccggaaagttcgcg

SEQ ID NO: 55805 - DNA, 20 bp, Neisseria gonorrhoeae
acgttgaaatcgccaaagac

SEQ ID NO: 55806 - DNA, 20 bp, Neisseria gonorrhoeae
aaatcgccaaagacctggcc

SEQ ID NO: 55807 - DNA, 20 bp, Neisseria gonorrhoeae
gtcctgaccgaggccgcaaa

SEQ ID NO: 55808 - DNA, 20 bp, Neisseria gonorrhoeae
gacgcggtttgcggcctcgg

SEQ ID NO: 55809 - DNA, 20 bp, Neisseria gonorrhoeae
gcggcctcggtcaggacgaa

SEQ ID NO: 55810 - DNA, 20 bp, Neisseria gonorrhoeae
ggcaacagcaaaggtatggc

SEQ ID NO: 55811 - DNA, 20 bp, Neisseria gonorrhoeae
gcgatgctggtggtggggct

SEQ ID NO: 55812 - DNA, 20 bp, Neisseria gonorrhoeae
ccaaaagccccaccaccagc

SEQ ID NO: 55813 - DNA, 20 bp, Neisseria gonorrhoeae
gctgttgccgaatatcgcca

SEQ ID NO: 55814 - DNA, 20 bp, Neisseria gonorrhoeae
ctgttgccgaatatcgccat

SEQ ID NO: 55815 - DNA, 20 bp, Neisseria gonorrhoeae
ccaccgccgccattgtcggc

SEQ ID NO: 55816 - DNA, 20 bp, Neisseria gonorrhoeae
tcggcacggcgggggcgttg

SEQ ID NO: 55817 - DNA, 20 bp, Neisseria gonorrhoeae
ggcgatgccggttcgcccgc

SEQ ID NO: 55818 - DNA, 20 bp, Neisseria gonorrhoeae
gcccgcgtccgattccacgc

SEQ ID NO: 55819 - DNA, 20 bp, Neisseria gonorrhoeae
cacgctgggcccgacgatgg

SEQ ID NO: 55820 - DNA, 20 bp, Neisseria gonorrhoeae
ccagcccccttccaaggcac

SEQ ID NO: 55821 - DNA, 20 bp, Neisseria gonorrhoeae
caaggcacggtaaaccgcca

SEQ ID NO: 55822 - DNA, 20 bp, Neisseria gonorrhoeae
gcccgcttccagcaggattt

SEQ ID NO: 55823 - DNA, 20 bp, Neisseria gonorrhoeae
cagcaggattttcagagcct

SEQ ID NO: 55824 - DNA, 20 bp, Neisseria gonorrhoeae
tcagagcctccgccgcctgt

SEQ ID NO: 55825 - DNA, 20 bp, Neisseria gonorrhoeae
ccatccgccgcgtcaaagtc

SEQ ID NO: 55826 - DNA, 20 bp, Neisseria gonorrhoeae
catccgccgcgtcaaagtca

SEQ ID NO: 55827 - DNA, 20 bp, Neisseria gonorrhoeae
ttcggtgcgggcgatttctt

SEQ ID NO: 55828 - DNA, 20 bp, Neisseria gonorrhoeae
ggtgcgggcgatttcttcgt

SEQ ID NO: 55829 - DNA, 20 bp, Neisseria gonorrhoeae
cttcgtcaggcgagagggct

SEQ ID NO: 55830 - DNA, 20 bp, Neisseria gonorrhoeae
gaaaccttggttgccgcgac

SEQ ID NO: 55831 - DNA, 20 bp, Neisseria gonorrhoeae
gttgccgcgactttggaagc

SEQ ID NO: 55832 - DNA, 20 bp, Neisseria gonorrhoeae
ccgcgactttggaagccagc

SEQ ID NO: 55833 - DNA, 20 bp, Neisseria gonorrhoeae
ggaagccagcatcctgccgg

SEQ ID NO: 55834 - DNA, 20 bp, Neisseria gonorrhoeae
gaagccagcatcctgccgga

SEQ ID NO: 55835 - DNA, 20 bp, Neisseria gonorrhoeae
gcgcaataccggctgatagt

SEQ ID NO: 55836 - DNA, 20 bp, Neisseria gonorrhoeae
cgcaataccggctgatagtg

SEQ ID NO: 55837 - DNA, 20 bp, Neisseria gonorrhoeae
cgcaaaccttgcgccacgcc

SEQ ID NO: 55838 - DNA, 20 bp, Neisseria gonorrhoeae
cgccacgccgttgatggtca

SEQ ID NO: 55839 - DNA, 20 bp, Neisseria gonorrhoeae
atggtcaggtgcaccatcag

SEQ ID NO: 55840 - DNA, 20 bp, Neisseria gonorrhoeae
tcctttcccgaaaccttgga

SEQ ID NO: 55841 - DNA, 20 bp, Neisseria gonorrhoeae
cctttcccgaaaccttggaa

SEQ ID NO: 55842 - DNA, 20 bp, Neisseria gonorrhoeae
ctttcccgaaaccttggaag

SEQ ID NO: 55843 - DNA, 20 bp, Neisseria gonorrhoeae
cccgaaaccttggaagtgtg

SEQ ID NO: 55844 - DNA, 20 bp, Neisseria gonorrhoeae
ccgaaaccttggaagtgtgt

SEQ ID NO: 55845 - DNA, 20 bp, Neisseria gonorrhoeae
cctccgcaatgggcgcgcag

SEQ ID NO: 55846 - DNA, 20 bp, Neisseria gonorrhoeae
ccggcatcggcgatctcatc

SEQ ID NO: 55847 - DNA, 20 bp, Neisseria gonorrhoeae
acctgtaccggtgcactttc

SEQ ID NO: 55848 - DNA, 20 bp, Neisseria gonorrhoeae
cgcgaaagtgcaccggtaca

SEQ ID NO: 55849 - DNA, 20 bp, Neisseria gonorrhoeae
tgggctgcgcgcccattgcg

SEQ ID NO: 55850 - DNA, 20 bp, Neisseria gonorrhoeae
gcgttcgaacagcggcgtgc

SEQ ID NO: 55851 - DNA, 20 bp, Neisseria gonorrhoeae
cgttcgaacagcggcgtgcc

SEQ ID NO: 55852 - DNA, 20 bp, Neisseria gonorrhoeae
gaacagcggcgtgccgtagt

SEQ ID NO: 55853 - DNA, 20 bp, Neisseria gonorrhoeae
tcgagcatacggatctggtg

SEQ ID NO: 55854 - DNA, 20 bp, Neisseria gonorrhoeae
cgagcatacggatctggtgg

SEQ ID NO: 55855 - DNA, 20 bp, Neisseria gonorrhoeae
cgtcccgacattgcccccgc

SEQ ID NO: 55856 - DNA, 20 bp, Neisseria gonorrhoeae
cccccgccgatttgggcgca

SEQ ID NO: 55857 - DNA, 20 bp, Neisseria gonorrhoeae
gggcgcagactggaagggcg

SEQ ID NO: 55858 - DNA, 20 bp, Neisseria gonorrhoeae
ggcgcagactggaagggcgg

SEQ ID NO: 55859 - DNA, 20 bp, Neisseria gonorrhoeae
ttctgcccgtgccacggttc

SEQ ID NO: 55860 - DNA, 20 bp, Neisseria gonorrhoeae
ctcgaagcgccgaacttcga

SEQ ID NO: 55861 - DNA, 20 bp, Neisseria gonorrhoeae
gatgcggcaaatgcgctgaa

SEQ ID NO: 55862 - DNA, 20 bp, Neisseria gonorrhoeae
tcagcgcatttgccgcatcg

SEQ ID NO: 55863 - DNA, 20 bp, Neisseria gonorrhoeae
cagcgcatttgccgcatcga

SEQ ID NO: 55864 - DNA, 20 bp, Neisseria gonorrhoeae
agcgcatttgccgcatcgaa

SEQ ID NO: 55865 - DNA, 20 bp, Neisseria gonorrhoeae
cagacggcatcattctaaaa

SEQ ID NO: 55866 - DNA, 20 bp, Neisseria gonorrhoeae
agacggcatcattctaaaaa

SEQ ID NO: 55867 - DNA, 20 bp, Neisseria gonorrhoeae
taaaaatgtcaggcatcggg

SEQ ID NO: 55868 - DNA, 20 bp, Neisseria gonorrhoeae
atcagggtttgtggcagatt

SEQ ID NO: 55869 - DNA, 20 bp, Neisseria gonorrhoeae
agttcccgatgcctgacatt

SEQ ID NO: 55870 - DNA, 20 bp, Neisseria gonorrhoeae
tcgccatcacgtccgcgccc

SEQ ID NO: 55871 - DNA, 20 bp, Neisseria gonorrhoeae
cgccatcacgtccgcgcccg

SEQ ID NO: 55872 - DNA, 20 bp, Neisseria gonorrhoeae
gccatcacgtccgcgcccga

SEQ ID NO: 55873 - DNA, 20 bp, Neisseria gonorrhoeae
ggtgtgccggcgcagcggcg

SEQ ID NO: 55874 - DNA, 20 bp, Neisseria gonorrhoeae
gtgtgccggcgcagcggcga

SEQ ID NO: 55875 - DNA, 20 bp, Neisseria gonorrhoeae
accgacttaatcaacgacta

SEQ ID NO: 55876 - DNA, 20 bp, Neisseria gonorrhoeae
atcaacgactacttcggcga

SEQ ID NO: 55877 - DNA, 20 bp, Neisseria gonorrhoeae
ggcgagggcgaataatgagt

SEQ ID NO: 55878 - DNA, 20 bp, Neisseria gonorrhoeae
gcccgccgccacgccgtgca

SEQ ID NO: 55879 - DNA, 20 bp, Neisseria gonorrhoeae
cccgccgccacgccgtgcag

SEQ ID NO: 55880 - DNA, 20 bp, Neisseria gonorrhoeae
ttccatgtgcgggcgaggtg

SEQ ID NO: 55881 - DNA, 20 bp, Neisseria gonorrhoeae
catgtgcgggcgaggtgctg

SEQ ID NO: 55882 - DNA, 20 bp, Neisseria gonorrhoeae
agaaaaatgccgtctgaaga

SEQ ID NO: 55883 - DNA, 20 bp, Neisseria gonorrhoeae
agacggcatttttctgaatg

SEQ ID NO: 55884 - DNA, 20 bp, Neisseria gonorrhoeae
ttctgaatgcggacggctgg

SEQ ID NO: 55885 - DNA, 20 bp, Neisseria gonorrhoeae
cgcgacaacgccctgagcaa

SEQ ID NO: 55886 - DNA, 20 bp, Neisseria gonorrhoeae
gaaacgcgccttgctcaggg

SEQ ID NO: 55887 - DNA, 20 bp, Neisseria gonorrhoeae
ctcagggcgttgtcgcgtaa

SEQ ID NO: 55888 - DNA, 20 bp, Neisseria gonorrhoeae
tcgcgtaattgcgcgtccgg

SEQ ID NO: 55889 - DNA, 20 bp, Neisseria gonorrhoeae
cgcgtccggccagcctttgg

SEQ ID NO: 55890 - DNA, 20 bp, Neisseria gonorrhoeae
gtgtcgatttttttggtgtc

SEQ ID NO: 55891 - DNA, 20 bp, Neisseria gonorrhoeae
ttttggtgtcgtcggcggtg

SEQ ID NO: 55892 - DNA, 20 bp, Neisseria gonorrhoeae
tttggtgtcgtcggcggtgc

SEQ ID NO: 55893 - DNA, 20 bp, Neisseria gonorrhoeae
ttggtgtcgtcggcggtgcc

SEQ ID NO: 55894 - DNA, 20 bp, Neisseria gonorrhoeae
tggtgtcgtcggcggtgccg

SEQ ID NO: 55895 - DNA, 20 bp, Neisseria gonorrhoeae
gcggcggtttgcggcaacac

SEQ ID NO: 55896 - DNA, 20 bp, Neisseria gonorrhoeae
gcggcaacacgggggcgagg

SEQ ID NO: 55897 - DNA, 20 bp, Neisseria gonorrhoeae
cggcaacacgggggcgaggt

SEQ ID NO: 55898 - DNA, 20 bp, Neisseria gonorrhoeae
atgagttcgctgcatacttc

SEQ ID NO: 55899 - DNA, 20 bp, Neisseria gonorrhoeae
accatgctgaccgcctacct

SEQ ID NO: 55900 - DNA, 20 bp, Neisseria gonorrhoeae
gattttgccgtcggtgttga

SEQ ID NO: 55901 - DNA, 20 bp, Neisseria gonorrhoeae
attttgccgtcggtgttgac

SEQ ID NO: 55902 - DNA, 20 bp, Neisseria gonorrhoeae
tgccgtcggtgttgacggca

SEQ ID NO: 55903 - DNA, 20 bp, Neisseria gonorrhoeae
gccgtcggtgttgacggcaa

SEQ ID NO: 55904 - DNA, 20 bp, Neisseria gonorrhoeae
ccgtcggtgttgacggcaat

SEQ ID NO: 55905 - DNA, 20 bp, Neisseria gonorrhoeae
tgcgcgcggtgatggggaat

SEQ ID NO: 55906 - DNA, 20 bp, Neisseria gonorrhoeae
tcgattgtgccgctgttttt

SEQ ID NO: 55907 - DNA, 20 bp, Neisseria gonorrhoeae
tgccgctgttttttcccgtc

SEQ ID NO: 55908 - DNA, 20 bp, Neisseria gonorrhoeae
cccgattccccatcaccgcg

SEQ ID NO: 55909 - DNA, 20 bp, Neisseria gonorrhoeae
ccgattccccatcaccgcgc

SEQ ID NO: 55910 - DNA, 20 bp, Neisseria gonorrhoeae
gcggtttttcaaattggcgc

SEQ ID NO: 55911 - DNA, 20 bp, Neisseria gonorrhoeae
ttcaaattggcgcagccgag

SEQ ID NO: 55912 - DNA, 20 bp, Neisseria gonorrhoeae
tcaaattggcgcagccgagg

SEQ ID NO: 55913 - DNA, 20 bp, Neisseria gonorrhoeae
caaattggcgcagccgaggc

SEQ ID NO: 55914 - DNA, 20 bp, Neisseria gonorrhoeae
aaattggcgcagccgaggcg

SEQ ID NO: 55915 - DNA, 20 bp, Neisseria gonorrhoeae
cttgccgtggcgcgcgaagg

SEQ ID NO: 55916 - DNA, 20 bp, Neisseria gonorrhoeae
ttgccgtggcgcgcgaaggt

SEQ ID NO: 55917 - DNA, 20 bp, Neisseria gonorrhoeae
ccgtggcgcgcgaaggtttg

SEQ ID NO: 55918 - DNA, 20 bp, Neisseria gonorrhoeae
ggagagcgtttttttcctgc

SEQ ID NO: 55919 - DNA, 20 bp, Neisseria gonorrhoeae
gagagcgtttttttcctgct

SEQ ID NO: 55920 - DNA, 20 bp, Neisseria gonorrhoeae
aaatggtgggcacagatgcg

SEQ ID NO: 55921 - DNA, 20 bp, Neisseria gonorrhoeae
aatggtgggcacagatgcgg

SEQ ID NO: 55922 - DNA, 20 bp, Neisseria gonorrhoeae
ggcgaccttcacgccgttct

SEQ ID NO: 55923 - DNA, 20 bp, Neisseria gonorrhoeae
gcgaccttcacgccgttctg

SEQ ID NO: 55924 - DNA, 20 bp, Neisseria gonorrhoeae
acgccgttctgccgcatctg

SEQ ID NO: 55925 - DNA, 20 bp, Neisseria gonorrhoeae
acaagccgagagaagaaacg

SEQ ID NO: 55926 - DNA, 20 bp, Neisseria gonorrhoeae
tcctgatgttccgtcttttg

SEQ ID NO: 55927 - DNA, 20 bp, Neisseria gonorrhoeae
cctgatgttccgtcttttgg

SEQ ID NO: 55928 - DNA, 20 bp, Neisseria gonorrhoeae
ctgatgttccgtcttttggg

SEQ ID NO: 55929 - DNA, 20 bp, Neisseria gonorrhoeae
cgtcttttgggtttttatgt

SEQ ID NO: 55930 - DNA, 20 bp, Neisseria gonorrhoeae
gggcggtccggaacggccgg

SEQ ID NO: 55931 - DNA, 20 bp, Neisseria gonorrhoeae
ggcggtccggaacggccggg

SEQ ID NO: 55932 - DNA, 20 bp, Neisseria gonorrhoeae
ttccgggctgtccgtccgta

SEQ ID NO: 55933 - DNA, 20 bp, Neisseria gonorrhoeae
cgggctgtccgtccgtatcg

SEQ ID NO: 55934 - DNA, 20 bp, Neisseria gonorrhoeae
gcatcgggattcaaatcggg

SEQ ID NO: 55935 - DNA, 20 bp, Neisseria gonorrhoeae
tctttcggccattcgccgtg

SEQ ID NO: 55936 - DNA, 20 bp, Neisseria gonorrhoeae
cggccattcgccgtgattcg

SEQ ID NO: 55937 - DNA, 20 bp, Neisseria gonorrhoeae
ggccattcgccgtgattcgg

SEQ ID NO: 55938 - DNA, 20 bp, Neisseria gonorrhoeae
gccgtgattcgggcaatacc

SEQ ID NO: 55939 - DNA, 20 bp, Neisseria gonorrhoeae
gggcaatacccggcaacgat

SEQ ID NO: 55940 - DNA, 20 bp, Neisseria gonorrhoeae
ggtagagttggcggatttgg

SEQ ID NO: 55941 - DNA, 20 bp, Neisseria gonorrhoeae
gcggatttggcaggcctcaa

SEQ ID NO: 55942 - DNA, 20 bp, Neisseria gonorrhoeae
ggcaggcctcaacccatcct

SEQ ID NO: 55943 - DNA, 20 bp, Neisseria gonorrhoeae
gcaggcctcaacccatcctg

SEQ ID NO: 55944 - DNA, 20 bp, Neisseria gonorrhoeae
gtaaaaggcgggcagggtgg

SEQ ID NO: 55945 - DNA, 20 bp, Neisseria gonorrhoeae
tgatccgctgttttgcttcg

SEQ ID NO: 55946 - DNA, 20 bp, Neisseria gonorrhoeae
gatccgctgttttgcttcgg

SEQ ID NO: 55947 - DNA, 20 bp, Neisseria gonorrhoeae
atccgctgttttgcttcggg

SEQ ID NO: 55948 - DNA, 20 bp, Neisseria gonorrhoeae
tgcttcgggcgtgtaggggg

SEQ ID NO: 55949 - DNA, 20 bp, Neisseria gonorrhoeae
gcttcgggcgtgtagggggc

SEQ ID NO: 55950 - DNA, 20 bp, Neisseria gonorrhoeae
caaaaagtcccgcagcagcg

SEQ ID NO: 55951 - DNA, 20 bp, Neisseria gonorrhoeae
ttcgggcgcgccttcgggga

SEQ ID NO: 55952 - DNA, 20 bp, Neisseria gonorrhoeae
tcgggcgcgccttcggggac

SEQ ID NO: 55953 - DNA, 20 bp, Neisseria gonorrhoeae
cgggcgcgccttcggggacg

SEQ ID NO: 55954 - DNA, 20 bp, Neisseria gonorrhoeae
gggcgcgccttcggggacgc

SEQ ID NO: 55955 - DNA, 20 bp, Neisseria gonorrhoeae
ggtgtttggcgcagatgacg

SEQ ID NO: 55956 - DNA, 20 bp, Neisseria gonorrhoeae
gtgtttggcgcagatgacgg

SEQ ID NO: 55957 - DNA, 20 bp, Neisseria gonorrhoeae
ggcgcagatgacggaggggc

SEQ ID NO: 55958 - DNA, 20 bp, Neisseria gonorrhoeae
gcgcagatgacggaggggcg

SEQ ID NO: 55959 - DNA, 20 bp, Neisseria gonorrhoeae
cgcgccgatgatgcggtatt

SEQ ID NO: 55960 - DNA, 20 bp, Neisseria gonorrhoeae
tttcgcgtcggcgctgtttg

SEQ ID NO: 55961 - DNA, 20 bp, Neisseria gonorrhoeae
ttcgcgtcggcgctgtttgt

SEQ ID NO: 55962 - DNA, 20 bp, Neisseria gonorrhoeae
tcgcgtcggcgctgtttgtc

SEQ ID NO: 55963 - DNA, 20 bp, Neisseria gonorrhoeae
cgcgtcggcgctgtttgtct

SEQ ID NO: 55964 - DNA, 20 bp, Neisseria gonorrhoeae
gcgtcggcgctgtttgtctt

SEQ ID NO: 55965 - DNA, 20 bp, Neisseria gonorrhoeae
ttccaagcaccccggcgcgg

SEQ ID NO: 55966 - DNA, 20 bp, Neisseria gonorrhoeae
tccaagcaccccggcgcggt

SEQ ID NO: 55967 - DNA, 20 bp, Neisseria gonorrhoeae
ccaagcaccccggcgcggta

SEQ ID NO: 55968 - DNA, 20 bp, Neisseria gonorrhoeae
caagcaccccggcgcggtaa

SEQ ID NO: 55969 - DNA, 20 bp, Neisseria gonorrhoeae
ttgaacctgccgatgtcctg

SEQ ID NO: 55970 - DNA, 20 bp, Neisseria gonorrhoeae
gcaggcggcgtactgatgga

SEQ ID NO: 55971 - DNA, 20 bp, Neisseria gonorrhoeae
caggcggcgtactgatggag

SEQ ID NO: 55972 - DNA, 20 bp, Neisseria gonorrhoeae
ggaagccaaagacggcttca

SEQ ID NO: 55973 - DNA, 20 bp, Neisseria gonorrhoeae
gaagccaaagacggcttcat

SEQ ID NO: 55974 - DNA, 20 bp, Neisseria gonorrhoeae
atgcgtgcgaatatggcgat

SEQ ID NO: 55975 - DNA, 20 bp, Neisseria gonorrhoeae
gggcatatcggtgcagaagc

SEQ ID NO: 55976 - DNA, 20 bp, Neisseria gonorrhoeae
ttcatcgggcggggaagcgg

SEQ ID NO: 55977 - DNA, 20 bp, Neisseria gonorrhoeae
tcatcgggcggggaagcggt

SEQ ID NO: 55978 - DNA, 20 bp, Neisseria gonorrhoeae
catcgggcggggaagcggtg

SEQ ID NO: 55979 - DNA, 20 bp, Neisseria gonorrhoeae
atcgggcggggaagcggtga

SEQ ID NO: 55980 - DNA, 20 bp, Neisseria gonorrhoeae
ggcggtggcgtagttgctgc

SEQ ID NO: 55981 - DNA, 20 bp, Neisseria gonorrhoeae
gcggtggcgtagttgctgcg

SEQ ID NO: 55982 - DNA, 20 bp, Neisseria gonorrhoeae
ctgcggttgcggcgtatggc

SEQ ID NO: 55983 - DNA, 20 bp, Neisseria gonorrhoeae
cggcgtatggcgaggcggtc

SEQ ID NO: 55984 - DNA, 20 bp, Neisseria gonorrhoeae
tccgacggtgagcgaaattt

SEQ ID NO: 55985 - DNA, 20 bp, Neisseria gonorrhoeae
tgccgcctactgcgctgccg

SEQ ID NO: 55986 - DNA, 20 bp, Neisseria gonorrhoeae
gccgcctactgcgctgccga

SEQ ID NO: 55987 - DNA, 20 bp, Neisseria gonorrhoeae
ccgcctactgcgctgccgat

SEQ ID NO: 55988 - DNA, 20 bp, Neisseria gonorrhoeae
cgctcaccgtcggacaactc

SEQ ID NO: 55989 - DNA, 20 bp, Neisseria gonorrhoeae
cgttttggcgggcaagccgg

SEQ ID NO: 55990 - DNA, 20 bp, Neisseria gonorrhoeae
tggcgggcaagccggcctgc

SEQ ID NO: 55991 - DNA, 20 bp, Neisseria gonorrhoeae
ggcgggcaagccggcctgcc

SEQ ID NO: 55992 - DNA, 20 bp, Neisseria gonorrhoeae
gcgggcaagccggcctgcct

SEQ ID NO: 55993 - DNA, 20 bp, Neisseria gonorrhoeae
cctgcctgaaaggttcggat

SEQ ID NO: 55994 - DNA, 20 bp, Neisseria gonorrhoeae
cgatgcgtggtggacggaag

SEQ ID NO: 55995 - DNA, 20 bp, Neisseria gonorrhoeae
cgaaatcgatgcgctgaagg

SEQ ID NO: 55996 - DNA, 20 bp, Neisseria gonorrhoeae
agcgcatcgatttcggaaca

SEQ ID NO: 55997 - DNA, 20 bp, Neisseria gonorrhoeae
cggaacacagcagcgcggca

SEQ ID NO: 55998 - DNA, 20 bp, Neisseria gonorrhoeae
ggaacacagcagcgcggcat

SEQ ID NO: 55999 - DNA, 20 bp, Neisseria gonorrhoeae
gccttcggctccgcgcagaa

SEQ ID NO: 56000 - DNA, 20 bp, Neisseria gonorrhoeae
ccttcggctccgcgcagaat

SEQ ID NO: 56001 - DNA, 20 bp, Neisseria gonorrhoeae
ggctccgcgcagaatgtcgc

SEQ ID NO: 56002 - DNA, 20 bp, Neisseria gonorrhoeae
gagggcggaacaggttacga

SEQ ID NO: 56003 - DNA, 20 bp, Neisseria gonorrhoeae
agggcggaacaggttacgat

SEQ ID NO: 56004 - DNA, 20 bp, Neisseria gonorrhoeae
tcgcggttggcttgggtgtg

SEQ ID NO: 56005 - DNA, 20 bp, Neisseria gonorrhoeae
gcttgggtgtggaactcgtc

SEQ ID NO: 56006 - DNA, 20 bp, Neisseria gonorrhoeae
ggtgtggaactcgtcgcctt

SEQ ID NO: 56007 - DNA, 20 bp, Neisseria gonorrhoeae
ggcatagggacattgaccga

SEQ ID NO: 56008 - DNA, 20 bp, Neisseria gonorrhoeae
accgaggtgtttctgcaggg

SEQ ID NO: 56009 - DNA, 20 bp, Neisseria gonorrhoeae
ccgatgccggaagcgcgcaa

SEQ ID NO: 56010 - DNA, 20 bp, Neisseria gonorrhoeae
cgtgattctgattaccggcg

SEQ ID NO: 56011 - DNA, 20 bp, Neisseria gonorrhoeae
tgattaccggcgcgggcggt

SEQ ID NO: 56012 - DNA, 20 bp, Neisseria gonorrhoeae
ccggcgcgggcggtatgttc

SEQ ID NO: 56013 - DNA, 20 bp, Neisseria gonorrhoeae
ggcggcgttttgcgcgcttc

SEQ ID NO: 56014 - DNA, 20 bp, Neisseria gonorrhoeae
gggaacgggaacatggatgg

SEQ ID NO: 56015 - DNA, 20 bp, Neisseria gonorrhoeae
gccgagcatatagccgctga

SEQ ID NO: 56016 - DNA, 20 bp, Neisseria gonorrhoeae
ccgagcatatagccgctgaa

SEQ ID NO: 56017 - DNA, 20 bp, Neisseria gonorrhoeae
atcacatggtatttcagcgg

SEQ ID NO: 56018 - DNA, 20 bp, Neisseria gonorrhoeae
cagcggctatatgctcggca

SEQ ID NO: 56019 - DNA, 20 bp, Neisseria gonorrhoeae
catgcgccgtgcggtggcga

SEQ ID NO: 56020 - DNA, 20 bp, Neisseria gonorrhoeae
atgcgccgtgcggtggcgaa

SEQ ID NO: 56021 - DNA, 20 bp, Neisseria gonorrhoeae
gccaccgcacggcgcatgaa

SEQ ID NO: 56022 - DNA, 20 bp, Neisseria gonorrhoeae
gcgcttgcctccgtcggcgc

SEQ ID NO: 56023 - DNA, 20 bp, Neisseria gonorrhoeae
cctccgtcggcgcattttcc

SEQ ID NO: 56024 - DNA, 20 bp, Neisseria gonorrhoeae
cggcagggcggcggcaggtt

SEQ ID NO: 56025 - DNA, 20 bp, Neisseria gonorrhoeae
gggcgcaaacggctttcaga

SEQ ID NO: 56026 - DNA, 20 bp, Neisseria gonorrhoeae
ggcgcaaacggctttcagac

SEQ ID NO: 56027 - DNA, 20 bp, Neisseria gonorrhoeae
cagacggcatgccgtatcac

SEQ ID NO: 56028 - DNA, 20 bp, Neisseria gonorrhoeae
agacggcatgccgtatcacg

SEQ ID NO: 56029 - DNA, 20 bp, Neisseria gonorrhoeae
ggttgatgaggccgtcgccg

SEQ ID NO: 56030 - DNA, 20 bp, Neisseria gonorrhoeae
atgaggccgtcgccgaatac

SEQ ID NO: 56031 - DNA, 20 bp, Neisseria gonorrhoeae
ggacgcgacgccgcctacgc

SEQ ID NO: 56032 - DNA, 20 bp, Neisseria gonorrhoeae
ttcgggtttgatttctttga

SEQ ID NO: 56033 - DNA, 20 bp, Neisseria gonorrhoeae
tcgggtttgatttctttgag

SEQ ID NO: 56034 - DNA, 20 bp, Neisseria gonorrhoeae
catcaactgttccataagca

SEQ ID NO: 56035 - DNA, 20 bp, Neisseria gonorrhoeae
cataagcaccttatcacttg

SEQ ID NO: 56036 - DNA, 20 bp, Neisseria gonorrhoeae
tcacttgtagccggaacacc

SEQ ID NO: 56037 - DNA, 20 bp, Neisseria gonorrhoeae
tagccggaacaccttggctc

SEQ ID NO: 56038 - DNA, 20 bp, Neisseria gonorrhoeae
gctcgttccaaatttccaag

SEQ ID NO: 56039 - DNA, 20 bp, Neisseria gonorrhoeae
acgctcaccgtctcgcccag

SEQ ID NO: 56040 - DNA, 20 bp, Neisseria gonorrhoeae
ggattacgggcggtttggcg

SEQ ID NO: 56041 - DNA, 20 bp, Neisseria gonorrhoeae
gattacgggcggtttggcgg

SEQ ID NO: 56042 - DNA, 20 bp, Neisseria gonorrhoeae
cgggcggtttggcggtgttt

SEQ ID NO: 56043 - DNA, 20 bp, Neisseria gonorrhoeae
ggcggtgtttgcctacctga

SEQ ID NO: 56044 - DNA, 20 bp, Neisseria gonorrhoeae
tttggcttgtggggcagggt

SEQ ID NO: 56045 - DNA, 20 bp, Neisseria gonorrhoeae
ggcttgtggggcagggtcgg

SEQ ID NO: 56046 - DNA, 20 bp, Neisseria gonorrhoeae
gcttgtggggcagggtcgga

SEQ ID NO: 56047 - DNA, 20 bp, Neisseria gonorrhoeae
tggggcagggtcggaatttt

SEQ ID NO: 56048 - DNA, 20 bp, Neisseria gonorrhoeae
tgcggcgaacacgcgcccaa

SEQ ID NO: 56049 - DNA, 20 bp, Neisseria gonorrhoeae
gccgtgggtttgcagcgcgt

SEQ ID NO: 56050 - DNA, 20 bp, Neisseria gonorrhoeae
ccgtgggtttgcagcgcgtc

SEQ ID NO: 56051 - DNA, 20 bp, Neisseria gonorrhoeae
gcagcgcgtcatacaggcgc

SEQ ID NO: 56052 - DNA, 20 bp, Neisseria gonorrhoeae
cagcgcgtcatacaggcgcg

SEQ ID NO: 56053 - DNA, 20 bp, Neisseria gonorrhoeae
cgcgctgcaacacgccgcgt

SEQ ID NO: 56054 - DNA, 20 bp, Neisseria gonorrhoeae
cagcgcggaacgggttactt

SEQ ID NO: 56055 - DNA, 20 bp, Neisseria gonorrhoeae
ctttggcagggtcgagtacg

SEQ ID NO: 56056 - DNA, 20 bp, Neisseria gonorrhoeae
ggcagggtcgagtacgccca

SEQ ID NO: 56057 - DNA, 20 bp, Neisseria gonorrhoeae
gcagggtcgagtacgcccat

SEQ ID NO: 56058 - DNA, 20 bp, Neisseria gonorrhoeae
tgacggcgggcatcccgctg

SEQ ID NO: 56059 - DNA, 20 bp, Neisseria gonorrhoeae
tgccatcggccaccgttacc

SEQ ID NO: 56060 - DNA, 20 bp, Neisseria gonorrhoeae
ccggggttctgcgcccttgg

SEQ ID NO: 56061 - DNA, 20 bp, Neisseria gonorrhoeae
tgcgcccttggctttccgcc

SEQ ID NO: 56062 - DNA, 20 bp, Neisseria gonorrhoeae
gctttccgccgcctcggacg

SEQ ID NO: 56063 - DNA, 20 bp, Neisseria gonorrhoeae
ccgccatcatcatcggcggc

SEQ ID NO: 56064 - DNA, 20 bp, Neisseria gonorrhoeae
ccggaattacgcaggcacct

SEQ ID NO: 56065 - DNA, 20 bp, Neisseria gonorrhoeae
cgcaggcacctgaacgcctt

SEQ ID NO: 56066 - DNA, 20 bp, Neisseria gonorrhoeae
tcctccatccgcgtcggcgg

SEQ ID NO: 56067 - DNA, 20 bp, Neisseria gonorrhoeae
aggtgcctgcgtaattccgg

SEQ ID NO: 56068 - DNA, 20 bp, Neisseria gonorrhoeae
gcgggttggatgggcgcgct

SEQ ID NO: 56069 - DNA, 20 bp, Neisseria gonorrhoeae
gatgggcgcgcttttcggca

SEQ ID NO: 56070 - DNA, 20 bp, Neisseria gonorrhoeae
tcggcagggtgcgaagcggc

SEQ ID NO: 56071 - DNA, 20 bp, Neisseria gonorrhoeae
cggcagggtgcgaagcggcg

SEQ ID NO: 56072 - DNA, 20 bp, Neisseria gonorrhoeae
ggcagggtgcgaagcggcgg

SEQ ID NO: 56073 - DNA, 20 bp, Neisseria gonorrhoeae
tggcgcacctctccggtgac

SEQ ID NO: 56074 - DNA, 20 bp, Neisseria gonorrhoeae
ccgcatttcaaagcggcgaa

SEQ ID NO: 56075 - DNA, 20 bp, Neisseria gonorrhoeae
caaagcggcgaagacgtaca

SEQ ID NO: 56076 - DNA, 20 bp, Neisseria gonorrhoeae
aaagcggcgaagacgtacac

SEQ ID NO: 56077 - DNA, 20 bp, Neisseria gonorrhoeae
ggcggcggtgcggcggtgta

SEQ ID NO: 56078 - DNA, 20 bp, Neisseria gonorrhoeae
cccgaaaacggcaccgtggg

SEQ ID NO: 56079 - DNA, 20 bp, Neisseria gonorrhoeae
cccacggtgccgttttcggg

SEQ ID NO: 56080 - DNA, 20 bp, Neisseria gonorrhoeae
tcgggcaatacggcatcggc

SEQ ID NO: 56081 - DNA, 20 bp, Neisseria gonorrhoeae
cgggcaatacggcatcggca

SEQ ID NO: 56082 - DNA, 20 bp, Neisseria gonorrhoeae
gggcaatacggcatcggcag

SEQ ID NO: 56083 - DNA, 20 bp, Neisseria gonorrhoeae
ttctgcataccgatttggcg

SEQ ID NO: 56084 - DNA, 20 bp, Neisseria gonorrhoeae
tctgcataccgatttggcgc

SEQ ID NO: 56085 - DNA, 20 bp, Neisseria gonorrhoeae
ctgcataccgatttggcgca

SEQ ID NO: 56086 - DNA, 20 bp, Neisseria gonorrhoeae
tgcataccgatttggcgcag

SEQ ID NO: 56087 - DNA, 20 bp, Neisseria gonorrhoeae
ggcgcaggtcggtttgttgg

SEQ ID NO: 56088 - DNA, 20 bp, Neisseria gonorrhoeae
cgaacccaaatggggaatct

SEQ ID NO: 56089 - DNA, 20 bp, Neisseria gonorrhoeae
cccatttgggttcggaacgc

SEQ ID NO: 56090 - DNA, 20 bp, Neisseria gonorrhoeae
gggttcggaacgcgcgcacg

SEQ ID NO: 56091 - DNA, 20 bp, Neisseria gonorrhoeae
ggttcggaacgcgcgcacgc

SEQ ID NO: 56092 - DNA, 20 bp, Neisseria gonorrhoeae
ggaacgcgcgcacgcgggct

SEQ ID NO: 56093 - DNA, 20 bp, Neisseria gonorrhoeae
ccagccgcattcgcgatatt

SEQ ID NO: 56094 - DNA, 20 bp, Neisseria gonorrhoeae
cagccgcattcgcgatattc

SEQ ID NO: 56095 - DNA, 20 bp, Neisseria gonorrhoeae
gcgatattcggcggcggggt

SEQ ID NO: 56096 - DNA, 20 bp, Neisseria gonorrhoeae
ggcggcggggtcgctgtcga

SEQ ID NO: 56097 - DNA, 20 bp, Neisseria gonorrhoeae
cggcatcgtcatcgacagcg

SEQ ID NO: 56098 - DNA, 20 bp, Neisseria gonorrhoeae
gagcgacagggtgcggatga

SEQ ID NO: 56099 - DNA, 20 bp, Neisseria gonorrhoeae
agcgacagggtgcggatgac

SEQ ID NO: 56100 - DNA, 20 bp, Neisseria gonorrhoeae
aacgcgccttcaaaccccaa

SEQ ID NO: 56101 - DNA, 20 bp, Neisseria gonorrhoeae
aaaccccaagccgccggaac

SEQ ID NO: 56102 - DNA, 20 bp, Neisseria gonorrhoeae
gaacccgtgttccggcggct

SEQ ID NO: 56103 - DNA, 20 bp, Neisseria gonorrhoeae
tcggcgcggtttttcgggtc

SEQ ID NO: 56104 - DNA, 20 bp, Neisseria gonorrhoeae
cggcgcggtttttcgggtct

SEQ ID NO: 56105 - DNA, 20 bp, Neisseria gonorrhoeae
ggcgcggtttttcgggtctg

SEQ ID NO: 56106 - DNA, 20 bp, Neisseria gonorrhoeae
ttcgggtctgcttgcaactc

SEQ ID NO: 56107 - DNA, 20 bp, Neisseria gonorrhoeae
tcgggtctgcttgcaactcg

SEQ ID NO: 56108 - DNA, 20 bp, Neisseria gonorrhoeae
cggatacggaggattgcggc

SEQ ID NO: 56109 - DNA, 20 bp, Neisseria gonorrhoeae
ggatacggaggattgcggcg

SEQ ID NO: 56110 - DNA, 20 bp, Neisseria gonorrhoeae
cggcgtggaaatgccggcgg

SEQ ID NO: 56111 - DNA, 20 bp, Neisseria gonorrhoeae
cccgacattcagacggcctc

SEQ ID NO: 56112 - DNA, 20 bp, Neisseria gonorrhoeae
agacggcctccccgccggca

SEQ ID NO: 56113 - DNA, 20 bp, Neisseria gonorrhoeae
gcaccttgtttgacggcccg

SEQ ID NO: 56114 - DNA, 20 bp, Neisseria gonorrhoeae
tttgacggcccgttccactt

SEQ ID NO: 56115 - DNA, 20 bp, Neisseria gonorrhoeae
gacggcccgttccacttttt

SEQ ID NO: 56116 - DNA, 20 bp, Neisseria gonorrhoeae
acggcccgttccactttttc

SEQ ID NO: 56117 - DNA, 20 bp, Neisseria gonorrhoeae
cactttttcggcaacggctt

SEQ ID NO: 56118 - DNA, 20 bp, Neisseria gonorrhoeae
cagttttcatgccgcctgaa

SEQ ID NO: 56119 - DNA, 20 bp, Neisseria gonorrhoeae
tcatgccgcctgaaaacccc

SEQ ID NO: 56120 - DNA, 20 bp, Neisseria gonorrhoeae
catgccgcctgaaaaccccc

SEQ ID NO: 56121 - DNA, 20 bp, Neisseria gonorrhoeae
atgccgcctgaaaacccccg

SEQ ID NO: 56122 - DNA, 20 bp, Neisseria gonorrhoeae
tgctgacccagacgattaca

SEQ ID NO: 56123 - DNA, 20 bp, Neisseria gonorrhoeae
atggcgtttgcctggctgtg

SEQ ID NO: 56124 - DNA, 20 bp, Neisseria gonorrhoeae
gcctggctgtggcccggcgt

SEQ ID NO: 56125 - DNA, 20 bp, Neisseria gonorrhoeae
cctggctgtggcccggcgtg

SEQ ID NO: 56126 - DNA, 20 bp, Neisseria gonorrhoeae
tcccacgatttgtggaatcc

SEQ ID NO: 56127 - DNA, 20 bp, Neisseria gonorrhoeae
cccacgatttgtggaatcct

SEQ ID NO: 56128 - DNA, 20 bp, Neisseria gonorrhoeae
ccaactgggcggcaggcgtt

SEQ ID NO: 56129 - DNA, 20 bp, Neisseria gonorrhoeae
ccctgacctgggctttgctg

SEQ ID NO: 56130 - DNA, 20 bp, Neisseria gonorrhoeae
gctgatgacgctgttcctgc

SEQ ID NO: 56131 - DNA, 20 bp, Neisseria gonorrhoeae
ctgatgacgctgttcctgcc

SEQ ID NO: 56132 - DNA, 20 bp, Neisseria gonorrhoeae
ctgccgtggctggacgcggc

SEQ ID NO: 56133 - DNA, 20 bp, Neisseria gonorrhoeae
cgcgctgttgaccgccatat

SEQ ID NO: 56134 - DNA, 20 bp, Neisseria gonorrhoeae
accgccatatcgtaaaaacc

SEQ ID NO: 56135 - DNA, 20 bp, Neisseria gonorrhoeae
gcgcggcggccagcagcttg

SEQ ID NO: 56136 - DNA, 20 bp, Neisseria gonorrhoeae
cgcggcggccagcagcttgt

SEQ ID NO: 56137 - DNA, 20 bp, Neisseria gonorrhoeae
tcttcgtcaaagccgcgtgt

SEQ ID NO: 56138 - DNA, 20 bp, Neisseria gonorrhoeae
tgtaccgccgtcaaacgggc

SEQ ID NO: 56139 - DNA, 20 bp, Neisseria gonorrhoeae
cgcgcgtctgtggtttggcg

SEQ ID NO: 56140 - DNA, 20 bp, Neisseria gonorrhoeae
ggcggccggccagcagtccg

SEQ ID NO: 56141 - DNA, 20 bp, Neisseria gonorrhoeae
gcggccggccagcagtccgc

SEQ ID NO: 56142 - DNA, 20 bp, Neisseria gonorrhoeae
ccgccgcattgggcagcccg

SEQ ID NO: 56143 - DNA, 20 bp, Neisseria gonorrhoeae
ggcgacctcgccatccgcta

SEQ ID NO: 56144 - DNA, 20 bp, Neisseria gonorrhoeae
atcgtcgccctcctcgtgct

SEQ ID NO: 56145 - DNA, 20 bp, Neisseria gonorrhoeae
ggtttggtagcggtagtagc

SEQ ID NO: 56146 - DNA, 20 bp, Neisseria gonorrhoeae
ggtagcggtagtagccgtag

SEQ ID NO: 56147 - DNA, 20 bp, Neisseria gonorrhoeae
gtagcggtagtagccgtagc

SEQ ID NO: 56148 - DNA, 20 bp, Neisseria gonorrhoeae
atattgtccaaatgggcaag

SEQ ID NO: 56149 - DNA, 20 bp, Neisseria gonorrhoeae
tccaaatgggcaaggttcag

SEQ ID NO: 56150 - DNA, 20 bp, Neisseria gonorrhoeae
agcggcgtttcgcgcaccat

SEQ ID NO: 56151 - DNA, 20 bp, Neisseria gonorrhoeae
cgcgcaccatcagcaccagc

SEQ ID NO: 56152 - DNA, 20 bp, Neisseria gonorrhoeae
gcgcaccatcagcaccagcc

SEQ ID NO: 56153 - DNA, 20 bp, Neisseria gonorrhoeae
agacggcattggaagggcag

SEQ ID NO: 56154 - DNA, 20 bp, Neisseria gonorrhoeae
gaagggcaggcacgccgtct

SEQ ID NO: 56155 - DNA, 20 bp, Neisseria gonorrhoeae
ccgccgatgaagccctgttg

SEQ ID NO: 56156 - DNA, 20 bp, Neisseria gonorrhoeae
gtccaacagggcttcatcgg

SEQ ID NO: 56157 - DNA, 20 bp, Neisseria gonorrhoeae
atcggcggcaacggtcgcgt

SEQ ID NO: 56158 - DNA, 20 bp, Neisseria gonorrhoeae
ccgacaaactggaaaccctg

SEQ ID NO: 56159 - DNA, 20 bp, Neisseria gonorrhoeae
ggggcatcggtttgattcct

SEQ ID NO: 56160 - DNA, 20 bp, Neisseria gonorrhoeae
gggcatcggtttgattccta

SEQ ID NO: 56161 - DNA, 20 bp, Neisseria gonorrhoeae
gattcctaccggcgacaaag

SEQ ID NO: 56162 - DNA, 20 bp, Neisseria gonorrhoeae
attcctaccggcgacaaaga

SEQ ID NO: 56163 - DNA, 20 bp, Neisseria gonorrhoeae
ggcgcggttaacgaaagcct

SEQ ID NO: 56164 - DNA, 20 bp, Neisseria gonorrhoeae
cgttaaccgcgcccaactcg

SEQ ID NO: 56165 - DNA, 20 bp, Neisseria gonorrhoeae
gttaaccgcgcccaactcgg

SEQ ID NO: 56166 - DNA, 20 bp, Neisseria gonorrhoeae
accgcgcccaactcggcatc

SEQ ID NO: 56167 - DNA, 20 bp, Neisseria gonorrhoeae
tttcagcaggttttgcacgc

SEQ ID NO: 56168 - DNA, 20 bp, Neisseria gonorrhoeae
cgtcccgccataccgacccg

SEQ ID NO: 56169 - DNA, 20 bp, Neisseria gonorrhoeae
acctcgaccgtaccaatacg

SEQ ID NO: 56170 - DNA, 20 bp, Neisseria gonorrhoeae
cctcgaccgtaccaatacgg

SEQ ID NO: 56171 - DNA, 20 bp, Neisseria gonorrhoeae
ttgcggctcggcaaagccgt

SEQ ID NO: 56172 - DNA, 20 bp, Neisseria gonorrhoeae
cggctcggcaaagccgtggc

SEQ ID NO: 56173 - DNA, 20 bp, Neisseria gonorrhoeae
gatgttgagcgaggcggaca

SEQ ID NO: 56174 - DNA, 20 bp, Neisseria gonorrhoeae
agcgaggcggacattgccgc

SEQ ID NO: 56175 - DNA, 20 bp, Neisseria gonorrhoeae
ccgcgcagacggcatttgcc

SEQ ID NO: 56176 - DNA, 20 bp, Neisseria gonorrhoeae
gccgccgcgttgccgcttct

SEQ ID NO: 56177 - DNA, 20 bp, Neisseria gonorrhoeae
ccgccgcgttgccgcttctg

SEQ ID NO: 56178 - DNA, 20 bp, Neisseria gonorrhoeae
ggcggtgggcggcaggattt

SEQ ID NO: 56179 - DNA, 20 bp, Neisseria gonorrhoeae
gcggtacggcgcgtatgtgc

SEQ ID NO: 56180 - DNA, 20 bp, Neisseria gonorrhoeae
tcgactacatcatcgctact

SEQ ID NO: 56181 - DNA, 20 bp, Neisseria gonorrhoeae
gggcggtaaatgtttggcgg

SEQ ID NO: 56182 - DNA, 20 bp, Neisseria gonorrhoeae
ggcggtaaatgtttggcggg

SEQ ID NO: 56183 - DNA, 20 bp, Neisseria gonorrhoeae
ggcgggtttcttcgggcagg

SEQ ID NO: 56184 - DNA, 20 bp, Neisseria gonorrhoeae
gcgggtttcttcgggcaggg

SEQ ID NO: 56185 - DNA, 20 bp, Neisseria gonorrhoeae
cttcgggcagggcgcgggtc

SEQ ID NO: 56186 - DNA, 20 bp, Neisseria gonorrhoeae
gtccaataataatatcggcg

SEQ ID NO: 56187 - DNA, 20 bp, Neisseria gonorrhoeae
caaaatggcgcgggcaatgg

SEQ ID NO: 56188 - DNA, 20 bp, Neisseria gonorrhoeae
aaaatggcgcgggcaatggc

SEQ ID NO: 56189 - DNA, 20 bp, Neisseria gonorrhoeae
ccgctgtccgccggataagt

SEQ ID NO: 56190 - DNA, 20 bp, Neisseria gonorrhoeae
tccggcggacagcggcaacg

SEQ ID NO: 56191 - DNA, 20 bp, Neisseria gonorrhoeae
gtcctgttcgggcggggtgt

SEQ ID NO: 56192 - DNA, 20 bp, Neisseria gonorrhoeae
tcctgttcgggcggggtgtc

SEQ ID NO: 56193 - DNA, 20 bp, Neisseria gonorrhoeae
gggcggggtgtcgagaaatg

SEQ ID NO: 56194 - DNA, 20 bp, Neisseria gonorrhoeae
ccaacatcagcatccctatg

SEQ ID NO: 56195 - DNA, 20 bp, Neisseria gonorrhoeae
ctcgccgccgacggcgtatg

SEQ ID NO: 56196 - DNA, 20 bp, Neisseria gonorrhoeae
atcaggggggcgatgaaggc

SEQ ID NO: 56197 - DNA, 20 bp, Neisseria gonorrhoeae
ggcgttgccgccaccgaaag

SEQ ID NO: 56198 - DNA, 20 bp, Neisseria gonorrhoeae
ccgccaccgaaagctatctt

SEQ ID NO: 56199 - DNA, 20 bp, Neisseria gonorrhoeae
ccgccttcatcgcccccctg

SEQ ID NO: 56200 - DNA, 20 bp, Neisseria gonorrhoeae
atcgcccccctgatcaacca

SEQ ID NO: 56201 - DNA, 20 bp, Neisseria gonorrhoeae
ggctccggcttctttggcgg

SEQ ID NO: 56202 - DNA, 20 bp, Neisseria gonorrhoeae
gctccggcttctttggcggc

SEQ ID NO: 56203 - DNA, 20 bp, Neisseria gonorrhoeae
tttggcggcagccatggtgc

SEQ ID NO: 56204 - DNA, 20 bp, Neisseria gonorrhoeae
ggcggcagccatggtgcgtc

SEQ ID NO: 56205 - DNA, 20 bp, Neisseria gonorrhoeae
gcggcagccatggtgcgtcc

SEQ ID NO: 56206 - DNA, 20 bp, Neisseria gonorrhoeae
tgatcatacctgtttcccgc

SEQ ID NO: 56207 - DNA, 20 bp, Neisseria gonorrhoeae
cccgcatccggttgcggggt

SEQ ID NO: 56208 - DNA, 20 bp, Neisseria gonorrhoeae
ccgcatccggttgcggggtt

SEQ ID NO: 56209 - DNA, 20 bp, Neisseria gonorrhoeae
cggggttgccgaacatgagt

SEQ ID NO: 56210 - DNA, 20 bp, Neisseria gonorrhoeae
ccgaacatgagttgtgccag

SEQ ID NO: 56211 - DNA, 20 bp, Human papillomavirus type 129
tttgacttaaaactaccatg

SEQ ID NO: 56212 - DNA, 20 bp, Human papillomavirus type 129
ttgacttaaaactaccatgt

SEQ ID NO: 56213 - DNA, 20 bp, Human papillomavirus type 129
tgacttaaaactaccatgta

SEQ ID NO: 56214 - DNA, 20 bp, Human papillomavirus type 129
gacttaaaactaccatgtat

SEQ ID NO: 56215 - DNA, 20 bp, Human papillomavirus type 129
acttaaaactaccatgtata

SEQ ID NO: 56216 - DNA, 20 bp, Human papillomavirus type 129
tctacggatgaggaaccaga

SEQ ID NO: 56217 - DNA, 20 bp, Human papillomavirus type 129
ccaagttgacagttggtgtc

SEQ ID NO: 56218 - DNA, 20 bp, Human papillomavirus type 129
acagttggtgtcctaattgt

SEQ ID NO: 56219 - DNA, 20 bp, Human papillomavirus type 129
gtgtcctaattgtaacaaag

SEQ ID NO: 56220 - DNA, 20 bp, Human papillomavirus type 129
taacaaaggtgtaagagttt

SEQ ID NO: 56221 - DNA, 20 bp, Human papillomavirus type 129
cagatattagtccgagactg

SEQ ID NO: 56222 - DNA, 20 bp, Human papillomavirus type 129
gtccgagactggaagcgatt

SEQ ID NO: 56223 - DNA, 20 bp, Human papillomavirus type 129
gtatatctccagaaaaagaa

SEQ ID NO: 56224 - DNA, 20 bp, Human papillomavirus type 129
tatatctccagaaaaagaaa

SEQ ID NO: 56225 - DNA, 20 bp, Human papillomavirus type 129
ttgtttgaggacagtggaat

SEQ ID NO: 56226 - DNA, 20 bp, Human papillomavirus type 129
atatttttataaaaaggagc

SEQ ID NO: 56227 - DNA, 20 bp, Human papillomavirus type 129
tatttttataaaaaggagca

SEQ ID NO: 56228 - DNA, 20 bp, Human papillomavirus type 129
ttataaaaaggagcatacgg

SEQ ID NO: 56229 - DNA, 20 bp, Human papillomavirus type 129
tataaaaaggagcatacgga

SEQ ID NO: 56230 - DNA, 20 bp, Human papillomavirus type 129
ataaaaaggagcatacggaa

SEQ ID NO: 56231 - DNA, 20 bp, Human papillomavirus type 129
caatacaaatgggcatcgtt

SEQ ID NO: 56232 - DNA, 20 bp, Human papillomavirus type 129
taaaatcccttgcgaaatct

SEQ ID NO: 56233 - DNA, 20 bp, Human papillomavirus type 129
aaaatcccttgcgaaatcta

SEQ ID NO: 56234 - DNA, 20 bp, Human papillomavirus type 129
aaatcccttgcgaaatctaa

SEQ ID NO: 56235 - DNA, 20 bp, Human papillomavirus type 129
cgaaatctaaatatgcagca

SEQ ID NO: 56236 - DNA, 20 bp, Human papillomavirus type 129
tattatgtggacaaagatgg

SEQ ID NO: 56237 - DNA, 20 bp, Human papillomavirus type 129
tgtggacaaagatggaaaca

SEQ ID NO: 56238 - DNA, 20 bp, Human papillomavirus type 129
ttttctattgttttttgaag

SEQ ID NO: 56239 - DNA, 20 bp, Human papillomavirus type 129
tctattgttttttgaagatg

SEQ ID NO: 56240 - DNA, 20 bp, Human papillomavirus type 129
ctattgttttttgaagatgc

SEQ ID NO: 56241 - DNA, 20 bp, Human papillomavirus type 129
ctcagaggcccagctaacaa

SEQ ID NO: 56242 - DNA, 20 bp, Human papillomavirus type 129
aagtgctggaggtatagatg

SEQ ID NO: 56243 - DNA, 20 bp, Human papillomavirus type 129
ggtcccctggctttagtaca

SEQ ID NO: 56244 - DNA, 20 bp, Human papillomavirus type 129
agtacagtctttaaatgggt

SEQ ID NO: 56245 - DNA, 20 bp, Human papillomavirus type 129
aaagactgtactaaagccag

SEQ ID NO: 56246 - DNA, 20 bp, Human papillomavirus type 129
ccagtggagcctggtgcttc

SEQ ID NO: 56247 - DNA, 20 bp, Human papillomavirus type 129
atctattgttcctttagctg

SEQ ID NO: 56248 - DNA, 20 bp, Human papillomavirus type 129
ttcctttagctgaaggttta

SEQ ID NO: 56249 - DNA, 20 bp, Human papillomavirus type 129
ctttagctgaaggtttacct

SEQ ID NO: 56250 - DNA, 20 bp, Human papillomavirus type 129
agctgaaggtttacctgata

SEQ ID NO: 56251 - DNA, 20 bp, Human papillomavirus type 129
atctgaaaggctgatcaata

SEQ ID NO: 56252 - DNA, 20 bp, Human papillomavirus type 129
tctgaaaggctgatcaatag

SEQ ID NO: 56253 - DNA, 20 bp, Human papillomavirus type 129
caacaagacaggttttaaat

SEQ ID NO: 56254 - DNA, 20 bp, Human papillomavirus type 129
taaatgtcaccgcccctagg

SEQ ID NO: 56255 - DNA, 20 bp, Human papillomavirus type 129
aaatgtcaccgcccctaggg

SEQ ID NO: 56256 - DNA, 20 bp, Human papillomavirus type 129
ccagaatcctttagtggagg

SEQ ID NO: 56257 - DNA, 20 bp, Human papillomavirus type 129
agtggaggtcacttaattgt

SEQ ID NO: 56258 - DNA, 20 bp, Human papillomavirus type 129
gtggaggtcacttaattgtt

SEQ ID NO: 56259 - DNA, 20 bp, Human papillomavirus type 129
attgttaccactacagacac

SEQ ID NO: 56260 - DNA, 20 bp, Human papillomavirus type 129
ttaccactacagacacacag

SEQ ID NO: 56261 - DNA, 20 bp, Human papillomavirus type 129
gccttagttgattcttcagt

SEQ ID NO: 56262 - DNA, 20 bp, Human papillomavirus type 129
ccttagttgattcttcagta

SEQ ID NO: 56263 - DNA, 20 bp, Human papillomavirus type 129
gttgattcttcagtatatga

SEQ ID NO: 56264 - DNA, 20 bp, Human papillomavirus type 129
attcttcagtatatgatcct

SEQ ID NO: 56265 - DNA, 20 bp, Human papillomavirus type 129
ttcagtatatgatcctcaaa

SEQ ID NO: 56266 - DNA, 20 bp, Human papillomavirus type 129
ttttttggaaaaagagaaca

SEQ ID NO: 56267 - DNA, 20 bp, Human papillomavirus type 129
tttggaaaaagagaacaact

SEQ ID NO: 56268 - DNA, 20 bp, Human papillomavirus type 129
ttggaaaaagagaacaactt

SEQ ID NO: 56269 - DNA, 20 bp, Human papillomavirus type 129
tggaaaaagagaacaacttt

SEQ ID NO: 56270 - DNA, 20 bp, Human papillomavirus type 129
ggaaaaagagaacaacttta

SEQ ID NO: 56271 - DNA, 20 bp, Human papillomavirus type 129
gcaaagtaccgttagaagca

SEQ ID NO: 56272 - DNA, 20 bp, Human papillomavirus type 129
caaagtaccgttagaagcag

SEQ ID NO: 56273 - DNA, 20 bp, Human papillomavirus type 129
gaagcagatgttttagctca

SEQ ID NO: 56274 - DNA, 20 bp, Human papillomavirus type 129
tagctcatattaatgcaatg

SEQ ID NO: 56275 - DNA, 20 bp, Human papillomavirus type 129
agctcatattaatgcaatgg

SEQ ID NO: 56276 - DNA, 20 bp, Human papillomavirus type 129
ctaatatgcattccatgtta

SEQ ID NO: 56277 - DNA, 20 bp, Human papillomavirus type 129
catgttaaactgtgaatgtt

SEQ ID NO: 56278 - DNA, 20 bp, Human papillomavirus type 129
aactgtgaatgtttacattg

SEQ ID NO: 56279 - DNA, 20 bp, Human papillomavirus type 129
acattgtacttgaatatcct

SEQ ID NO: 56280 - DNA, 20 bp, Human papillomavirus type 129
cattgtacttgaatatcctg

SEQ ID NO: 56281 - DNA, 20 bp, Influenza A virus
tcgaacttgcggaaaaggca

SEQ ID NO: 56282 - DNA, 20 bp, Influenza A virus
cggaaaaggcaatgaaagag

SEQ ID NO: 56283 - DNA, 20 bp, Influenza A virus
gcagcaatatgcactcactt

SEQ ID NO: 56284 - DNA, 20 bp, Influenza A virus
cagcaatatgcactcacttg

SEQ ID NO: 56285 - DNA, 20 bp, Influenza A virus
caagtgagtgcatattgctg

SEQ ID NO: 56286 - DNA, 20 bp, Influenza A virus
gcaacaccacaggagctgag

SEQ ID NO: 56287 - DNA, 20 bp, Influenza A virus
caacaccacaggagctgaga

SEQ ID NO: 56288 - DNA, 20 bp, Influenza A virus
ctgccagatttgtatgatta

SEQ ID NO: 56289 - DNA, 20 bp, Influenza A virus
tgccagatttgtatgattac

SEQ ID NO: 56290 - DNA, 20 bp, Influenza A virus
gtatgattacaaggagaata

SEQ ID NO: 56291 - DNA, 20 bp, Influenza A virus
gacttccggatgggcctcct

SEQ ID NO: 56292 - DNA, 20 bp, Influenza A virus
cggatgggcctccttgtttt

SEQ ID NO: 56293 - DNA, 20 bp, Influenza A virus
ttttcagcggtccaaattcc

SEQ ID NO: 56294 - DNA, 20 bp, Influenza A virus
tcagcggtccaaattcctgc

SEQ ID NO: 56295 - DNA, 20 bp, Influenza A virus
cagcggtccaaattcctgct

SEQ ID NO: 56296 - DNA, 20 bp, Influenza A virus
agaatgaggagaagattcca

SEQ ID NO: 56297 - DNA, 20 bp, Influenza A virus
caagaactaaaaacatgaag

SEQ ID NO: 56298 - DNA, 20 bp, Influenza A virus
gtgagaacatggcaccagag

SEQ ID NO: 56299 - DNA, 20 bp, Influenza A virus
tctggtgccatgttctcacc

SEQ ID NO: 56300 - DNA, 20 bp, Influenza A virus
tcaccaagtgcccactttag

SEQ ID NO: 56301 - DNA, 20 bp, Influenza A virus
gagaagacgtggctccaatt

SEQ ID NO: 56302 - DNA, 20 bp, Influenza A virus
aacacattgcaagcatgaga

SEQ ID NO: 56303 - DNA, 20 bp, Influenza A virus
caagcatgagaaggaattac

SEQ ID NO: 56304 - DNA, 20 bp, Influenza A virus
cttcacagcagaggtgtccc

SEQ ID NO: 56305 - DNA, 20 bp, Influenza A virus
acagcagaggtgtcccattg

SEQ ID NO: 56306 - DNA, 20 bp, Influenza A virus
aggaatgacaccgacgtggt

SEQ ID NO: 56307 - DNA, 20 bp, Influenza A virus
gtgagcatggagttttctct

SEQ ID NO: 56308 - DNA, 20 bp, Influenza A virus
tgagcatggagttttctctc

SEQ ID NO: 56309 - DNA, 20 bp, Influenza A virus
tctctcactgacccgagact

SEQ ID NO: 56310 - DNA, 20 bp, Influenza A virus
ctctcactgacccgagactt

SEQ ID NO: 56311 - DNA, 20 bp, Influenza A virus
aagccgagtcctctgtcaaa

SEQ ID NO: 56312 - DNA, 20 bp, Influenza A virus
tttgagaataaatcagaaac

SEQ ID NO: 56313 - DNA, 20 bp, Influenza A virus
ttgagaataaatcagaaaca

SEQ ID NO: 56314 - DNA, 20 bp, Influenza A virus
tgagaataaatcagaaacat

SEQ ID NO: 56315 - DNA, 20 bp, Influenza A virus
gagaataaatcagaaacatg

SEQ ID NO: 56316 - DNA, 20 bp, Hepatitis delta virus
agcgaacagagagcgcatcg

SEQ ID NO: 56317 - DNA, 20 bp, Hepatitis delta virus
ggggagaccgaagcgaggag

SEQ ID NO: 56318 - DNA, 20 bp, Hepatitis delta virus
gctttcctcctcgcttcggt

SEQ ID NO: 56319 - DNA, 20 bp, Hepatitis delta virus
ctttcctcctcgcttcggtc

SEQ ID NO: 56320 - DNA, 20 bp, Hepatitis delta virus
cctcctcgcttcggtctccc

SEQ ID NO: 56321 - DNA, 20 bp, Hepatitis delta virus
gaacattggggaccagtgga

SEQ ID NO: 56322 - DNA, 20 bp, Hepatitis delta virus
aacattggggaccagtggag

SEQ ID NO: 56323 - DNA, 20 bp, Hepatitis delta virus
gggaccagtggagccatggg

SEQ ID NO: 56324 - DNA, 20 bp, Hepatitis delta virus
cgcccaagctccttcccccc

SEQ ID NO: 56325 - DNA, 20 bp, Hepatitis delta virus
gggggaaggagcttgggcgg

SEQ ID NO: 56326 - DNA, 20 bp, Hepatitis delta virus
gccatccgagtggacgtgcg

SEQ ID NO: 56327 - DNA, 20 bp, Hepatitis delta virus
ggatgcccaggtcggaccgc

SEQ ID NO: 56328 - DNA, 20 bp, Hepatitis delta virus
catgctggggacgaagccgc

SEQ ID NO: 56329 - DNA, 20 bp, Hepatitis delta virus
caccttcgagggggttcaca

SEQ ID NO: 56330 - DNA, 20 bp, Hepatitis delta virus
gagggggttcacacccccaa

SEQ ID NO: 56331 - DNA, 20 bp, Hepatitis delta virus
ggggtgtgaaccccctcgaa

SEQ ID NO: 56332 - DNA, 20 bp, Hepatitis delta virus
gtccccagcatgcaaggagt

SEQ ID NO: 56333 - DNA, 20 bp, Hepatitis delta virus
gtcggtgatcctgcctctcc

SEQ ID NO: 56334 - DNA, 20 bp, Hepatitis delta virus
tcggtgaatcctcccctgga

SEQ ID NO: 56335 - DNA, 20 bp, Hepatitis delta virus
ctaggtccggagtctacttc

SEQ ID NO: 56336 - DNA, 20 bp, Hepatitis delta virus
catctggtccgttcgggccc

SEQ ID NO: 56337 - DNA, 20 bp, Hepatitis delta virus
gggccctcttcgccggggga

SEQ ID NO: 56338 - DNA, 20 bp, Human papillomavirus type 26
gaggatcctagagaacgacc

SEQ ID NO: 56339 - DNA, 20 bp, Human papillomavirus type 26
aatactactttgcaaaattt

SEQ ID NO: 56340 - DNA, 20 bp, Human papillomavirus type 26
tgcaaagtagtattcaagct

SEQ ID NO: 56341 - DNA, 20 bp, Human papillomavirus type 26
gcaaagtagtattcaagctt

SEQ ID NO: 56342 - DNA, 20 bp, Human papillomavirus type 26
caaagtagtattcaagcttt

SEQ ID NO: 56343 - DNA, 20 bp, Human papillomavirus type 26
actaaaaaaagtttatgtaa

SEQ ID NO: 56344 - DNA, 20 bp, Human papillomavirus type 26
atgtaatttgttaataaggt

SEQ ID NO: 56345 - DNA, 20 bp, Human papillomavirus type 26
tgtaatttgttaataaggtg

SEQ ID NO: 56346 - DNA, 20 bp, Human papillomavirus type 26
gttaataaggtgtcatagat

SEQ ID NO: 56347 - DNA, 20 bp, Human papillomavirus type 26
ttaataaggtgtcatagatg

SEQ ID NO: 56348 - DNA, 20 bp, Human papillomavirus type 26
acctacgctgctacgaacaa

SEQ ID NO: 56349 - DNA, 20 bp, Human papillomavirus type 26
gactatgaacaatttgacag

SEQ ID NO: 56350 - DNA, 20 bp, Human papillomavirus type 26
gacagctcagatgaggatga

SEQ ID NO: 56351 - DNA, 20 bp, Human papillomavirus type 26
acagctcagatgaggatgaa

SEQ ID NO: 56352 - DNA, 20 bp, Human papillomavirus type 26
tctgtttcatcctcatctga

SEQ ID NO: 56353 - DNA, 20 bp, Human papillomavirus type 26
tcagtagaagctatagtgga

SEQ ID NO: 56354 - DNA, 20 bp, Human papillomavirus type 26
cagtagaagctatagtggaa

SEQ ID NO: 56355 - DNA, 20 bp, Human papillomavirus type 26
agtagaagctatagtggaaa

SEQ ID NO: 56356 - DNA, 20 bp, Human papillomavirus type 26
tgtcccctgtatgtttttcc

SEQ ID NO: 56357 - DNA, 20 bp, Human papillomavirus type 26
ttccactatagcttctactg

SEQ ID NO: 56358 - DNA, 20 bp, Human papillomavirus type 26
aggcacaacaaaaacaggca

SEQ ID NO: 56359 - DNA, 20 bp, Human papillomavirus type 26
aaaacgaaagttactaggta

SEQ ID NO: 56360 - DNA, 20 bp, Human papillomavirus type 26
aaacgaaagttactaggtag

SEQ ID NO: 56361 - DNA, 20 bp, Human papillomavirus type 26
ctaggtagtcagaacagccc

SEQ ID NO: 56362 - DNA, 20 bp, Human papillomavirus type 26
caagacataacaaatcaaca

SEQ ID NO: 56363 - DNA, 20 bp, Human papillomavirus type 26
actgatgtaaattggaaaag

SEQ ID NO: 56364 - DNA, 20 bp, Human papillomavirus type 26
gaaaagctttttttccacca

SEQ ID NO: 56365 - DNA, 20 bp, Human papillomavirus type 26
ttttccaccacctggtccag

SEQ ID NO: 56366 - DNA, 20 bp, Human papillomavirus type 26
tttccaccacctggtccaga

SEQ ID NO: 56367 - DNA, 20 bp, Human papillomavirus type 26
ttccaccacctggtccagat

SEQ ID NO: 56368 - DNA, 20 bp, Human papillomavirus type 26
tgtgtaaacaaaaggcatgg

SEQ ID NO: 56369 - DNA, 20 bp, Human papillomavirus type 26
aaatacatatagcattgcag

SEQ ID NO: 56370 - DNA, 20 bp, Human papillomavirus type 26
cagtcgttaataaacacgga

SEQ ID NO: 56371 - DNA, 20 bp, Human papillomavirus type 26
ataaacacggactataatac

SEQ ID NO: 56372 - DNA, 20 bp, Human papillomavirus type 26
gacaatgcgagacacaagct

SEQ ID NO: 56373 - DNA, 20 bp, Human papillomavirus type 26
atgcaaaagggatatattat

SEQ ID NO: 56374 - DNA, 20 bp, Human papillomavirus type 26
tacacaaggggcatataagc

SEQ ID NO: 56375 - DNA, 20 bp, Human papillomavirus type 26
cgtggactttaaacaagagg

SEQ ID NO: 56376 - DNA, 20 bp, Human papillomavirus type 26
aaacaagaggcggaaaaata

SEQ ID NO: 56377 - DNA, 20 bp, Human papillomavirus type 26
aacaagaggcggaaaaatat

SEQ ID NO: 56378 - DNA, 20 bp, Human papillomavirus type 26
ttgtttgtatagtccactga

SEQ ID NO: 56379 - DNA, 20 bp, Human papillomavirus type 26
tttgtatagtccactgactg

SEQ ID NO: 56380 - DNA, 20 bp, Human papillomavirus type 26
gtatagtccactgactgtcc

SEQ ID NO: 56381 - DNA, 20 bp, Human papillomavirus type 26
tatagtccactgactgtccg

SEQ ID NO: 56382 - DNA, 20 bp, Human papillomavirus type 26
tatagttactttggtggagg

SEQ ID NO: 56383 - DNA, 20 bp, Human papillomavirus type 26
ctttggtggaggaatctagt

SEQ ID NO: 56384 - DNA, 20 bp, Human papillomavirus type 26
ggtggaggaatctagtatta

SEQ ID NO: 56385 - DNA, 20 bp, Human papillomavirus type 26
gtggaggaatctagtattat

SEQ ID NO: 56386 - DNA, 20 bp, Human papillomavirus type 26
tacaatctggagcccctata

SEQ ID NO: 56387 - DNA, 20 bp, Human papillomavirus type 26
tttggacattattgcattgc

SEQ ID NO: 56388 - DNA, 20 bp, Human papillomavirus type 26
ttggacattattgcattgca

SEQ ID NO: 56389 - DNA, 20 bp, Human papillomavirus type 26
tggacattattgcattgcat

SEQ ID NO: 56390 - DNA, 20 bp, Human papillomavirus type 26
ggacattattgcattgcatc

SEQ ID NO: 56391 - DNA, 20 bp, Human papillomavirus type 26
gacattattgcattgcatcg

SEQ ID NO: 56392 - DNA, 20 bp, Human papillomavirus type 26
ctagcatacatacgccgcgc

SEQ ID NO: 56393 - DNA, 20 bp, Human papillomavirus type 26
ccctacaacattaccagttc

SEQ ID NO: 56394 - DNA, 20 bp, Human papillomavirus type 26
ccagttccaagatatgcctc

SEQ ID NO: 56395 - DNA, 20 bp, Human papillomavirus type 26
caagatatgcctccaatgtg

SEQ ID NO: 56396 - DNA, 20 bp, Human papillomavirus type 26
atagaggaaaacacattgga

SEQ ID NO: 56397 - DNA, 20 bp, Human papillomavirus type 26
atttaatccataaacgccgt

SEQ ID NO: 56398 - DNA, 20 bp, Human papillomavirus type 26
tttaatccataaacgccgta

SEQ ID NO: 56399 - DNA, 20 bp, Human papillomavirus type 26
aatccataaacgccgtaaac

SEQ ID NO: 56400 - DNA, 20 bp, Human papillomavirus type 26
atccataaacgccgtaaacg

SEQ ID NO: 56401 - DNA, 20 bp, Human papillomavirus type 26
ttttttttcagatggctttg

SEQ ID NO: 56402 - DNA, 20 bp, Human papillomavirus type 26
agagtgcacctacctgatcc

SEQ ID NO: 56403 - DNA, 20 bp, Human papillomavirus type 26
gagtgcacctacctgatcct

SEQ ID NO: 56404 - DNA, 20 bp, Human papillomavirus type 26
ggattgcctgatccacagtt

SEQ ID NO: 56405 - DNA, 20 bp, Human papillomavirus type 26
gattgcctgatccacagtta

SEQ ID NO: 56406 - DNA, 20 bp, Human papillomavirus type 26
cctgatccacagttatataa

SEQ ID NO: 56407 - DNA, 20 bp, Human papillomavirus type 26
ggagagcactggggtattgg

SEQ ID NO: 56408 - DNA, 20 bp, Human papillomavirus type 26
gcactatatgtaaaaataca

SEQ ID NO: 56409 - DNA, 20 bp, Human papillomavirus type 26
cccccccttagaattaattt

SEQ ID NO: 56410 - DNA, 20 bp, Human papillomavirus type 26
gaattaatttccagcattat

SEQ ID NO: 56411 - DNA, 20 bp, Human papillomavirus type 26
atttccagcattattgagga

SEQ ID NO: 56412 - DNA, 20 bp, Human papillomavirus type 26
gccgggaacaattatttgcc

SEQ ID NO: 56413 - DNA, 20 bp, Human papillomavirus type 26
tttgccagacatttttataa

SEQ ID NO: 56414 - DNA, 20 bp, Human papillomavirus type 26
gccagacatttttataataa

SEQ ID NO: 56415 - DNA, 20 bp, Human papillomavirus type 26
ccagacatttttataataag

SEQ ID NO: 56416 - DNA, 20 bp, Human papillomavirus type 26
ttataataaggcgggggctg

SEQ ID NO: 56417 - DNA, 20 bp, Human papillomavirus type 26
ctaaataattccgcatgttt

SEQ ID NO: 56418 - DNA, 20 bp, Human papillomavirus type 26
cgcatgtttgtgtgtgtgta

SEQ ID NO: 56419 - DNA, 20 bp, Human papillomavirus type 26
gtgtgtgtgtatatgtttgt

SEQ ID NO: 56420 - DNA, 20 bp, Human papillomavirus type 26
tgtgtgtgtatatgtttgtg

SEQ ID NO: 56421 - DNA, 20 bp, Human papillomavirus type 26
gtggtatgttatgtaaggtg

SEQ ID NO: 56422 - DNA, 20 bp, Hepatitis GB virus B
cccctgcccgtctgcagaag

SEQ ID NO: 56423 - DNA, 20 bp, Hepatitis GB virus B
ccctgcccgtctgcagaagg

SEQ ID NO: 56424 - DNA, 20 bp, Hepatitis GB virus B
gtatgtaggcggcgggactc

SEQ ID NO: 56425 - DNA, 20 bp, Hepatitis GB virus B
gcgcttgtcatcacgcgagc

SEQ ID NO: 56426 - DNA, 20 bp, Hepatitis GB virus B
tcatcacgcgagcgtcatga

SEQ ID NO: 56427 - DNA, 20 bp, Hepatitis GB virus B
ggatggttggggttagccat

SEQ ID NO: 56428 - DNA, 20 bp, Hepatitis GB virus B
gggttagccatccataccgt

SEQ ID NO: 56429 - DNA, 20 bp, Hepatitis GB virus B
gccatccataccgtactgcc

SEQ ID NO: 56430 - DNA, 20 bp, Hepatitis GB virus B
cgaggggatctgggagtctc

SEQ ID NO: 56431 - DNA, 20 bp, Hepatitis GB virus B
tttgagtagaaataacaggc

SEQ ID NO: 56432 - DNA, 20 bp, Hepatitis GB virus B
gaccagtctgccagatagta

SEQ ID NO: 56433 - DNA, 20 bp, Hepatitis GB virus B
ctggaggatggagtcaactg

SEQ ID NO: 56434 - DNA, 20 bp, Hepatitis GB virus B
gttcggtgtccacctttttg

SEQ ID NO: 56435 - DNA, 20 bp, Hepatitis GB virus B
ggtgtccacctttttgtggt

SEQ ID NO: 56436 - DNA, 20 bp, Hepatitis GB virus B
actccatcctccagcaagcg

SEQ ID NO: 56437 - DNA, 20 bp, Hepatitis GB virus B
tgtgatctgtgcggacgagt

SEQ ID NO: 56438 - DNA, 20 bp, Hepatitis GB virus B
ccgccaatccgtacatctca

SEQ ID NO: 56439 - DNA, 20 bp, Hepatitis GB virus B
caattggactggcacggact

SEQ ID NO: 56440 - DNA, 20 bp, Hepatitis GB virus B
gactggcacggactccttct

SEQ ID NO: 56441 - DNA, 20 bp, Hepatitis GB virus B
ttggctgaccacattgattt

SEQ ID NO: 56442 - DNA, 20 bp, Hepatitis GB virus B
gtacccctatacaatccctg

SEQ ID NO: 56443 - DNA, 20 bp, Hepatitis GB virus B
aattcaaaaataacacatgg

SEQ ID NO: 56444 - DNA, 20 bp, Hepatitis GB virus B
aaaaataacacatggggttg

SEQ ID NO: 56445 - DNA, 20 bp, Hepatitis GB virus B
ctgccgtattcgcaatgtgc

SEQ ID NO: 56446 - DNA, 20 bp, Hepatitis GB virus B
cgaatacggcagcaacccca

SEQ ID NO: 56447 - DNA, 20 bp, Hepatitis GB virus B
acttttatgaccctgtgaat

SEQ ID NO: 56448 - DNA, 20 bp, Hepatitis GB virus B
cttttatgaccctgtgaatt

SEQ ID NO: 56449 - DNA, 20 bp, Hepatitis GB virus B
tatgaccctgtgaattccac

SEQ ID NO: 56450 - DNA, 20 bp, Hepatitis GB virus B
atgaccctgtgaattccact

SEQ ID NO: 56451 - DNA, 20 bp, Hepatitis GB virus B
tgaccctgtgaattccactc

SEQ ID NO: 56452 - DNA, 20 bp, Hepatitis GB virus B
taggtccttggcctctggta

SEQ ID NO: 56453 - DNA, 20 bp, Hepatitis GB virus B
gcctctggtagcgcttttaa

SEQ ID NO: 56454 - DNA, 20 bp, Hepatitis GB virus B
taaccctcttgcatttggtt

SEQ ID NO: 56455 - DNA, 20 bp, Hepatitis GB virus B
aaccctcttgcatttggtta

SEQ ID NO: 56456 - DNA, 20 bp, Hepatitis GB virus B
accctcttgcatttggttac

SEQ ID NO: 56457 - DNA, 20 bp, Hepatitis GB virus B
tatgtttaacatccagtgca

SEQ ID NO: 56458 - DNA, 20 bp, Hepatitis GB virus B
aacatccagtgcagcatcgt

SEQ ID NO: 56459 - DNA, 20 bp, Hepatitis GB virus B
acatccagtgcagcatcgtt

SEQ ID NO: 56460 - DNA, 20 bp, Hepatitis GB virus B
tttgggactgactctagggt

SEQ ID NO: 56461 - DNA, 20 bp, Hepatitis GB virus B
gggactgactctagggttag

SEQ ID NO: 56462 - DNA, 20 bp, Hepatitis GB virus B
ttgcgcgtctcggcgacctt

SEQ ID NO: 56463 - DNA, 20 bp, Hepatitis GB virus B
cgcgtctcggcgaccttgtt

SEQ ID NO: 56464 - DNA, 20 bp, Hepatitis GB virus B
ttttcgcagggttggctatg

SEQ ID NO: 56465 - DNA, 20 bp, Hepatitis GB virus B
tcgcagggttggctatgccg

SEQ ID NO: 56466 - DNA, 20 bp, Hepatitis GB virus B
cgcagggttggctatgccgc

SEQ ID NO: 56467 - DNA, 20 bp, Hepatitis GB virus B
ctcggtgctcttgcggggag

SEQ ID NO: 56468 - DNA, 20 bp, Hepatitis GB virus B
cggggagaccaaggggtatc

SEQ ID NO: 56469 - DNA, 20 bp, Hepatitis GB virus B
ccagataccccttggtctcc

SEQ ID NO: 56470 - DNA, 20 bp, Hepatitis GB virus B
gtctccccgcaagagcaccg

SEQ ID NO: 56471 - DNA, 20 bp, Hepatitis GB virus B
atagatgtcctggtcattag

SEQ ID NO: 56472 - DNA, 20 bp, Hepatitis GB virus B
agtgcaaattttaattgccc

SEQ ID NO: 56473 - DNA, 20 bp, Hepatitis GB virus B
taattgcccccactggcagc

SEQ ID NO: 56474 - DNA, 20 bp, Hepatitis GB virus B
aattgcccccactggcagcg

SEQ ID NO: 56475 - DNA, 20 bp, Hepatitis GB virus B
attgcccccactggcagcgg

SEQ ID NO: 56476 - DNA, 20 bp, Hepatitis GB virus B
cccccactggcagcggcaag

SEQ ID NO: 56477 - DNA, 20 bp, Hepatitis GB virus B
ggctagtggttcttgccacg

SEQ ID NO: 56478 - DNA, 20 bp, Hepatitis GB virus B
ttgccacggctaccccccct

SEQ ID NO: 56479 - DNA, 20 bp, Hepatitis GB virus B
ccacggctaccccccctgga

SEQ ID NO: 56480 - DNA, 20 bp, Hepatitis GB virus B
aattaaccgatgaaggcact

SEQ ID NO: 56481 - DNA, 20 bp, Hepatitis GB virus B
accgatgaaggcactatccc

SEQ ID NO: 56482 - DNA, 20 bp, Hepatitis GB virus B
gtcatcaacagaagctcaaa

SEQ ID NO: 56483 - DNA, 20 bp, Hepatitis GB virus B
tcatcaacagaagctcaaac

SEQ ID NO: 56484 - DNA, 20 bp, Hepatitis GB virus B
tggacacctatcgcacccaa

SEQ ID NO: 56485 - DNA, 20 bp, Hepatitis GB virus B
cctgcgataggagcaaattt

SEQ ID NO: 56486 - DNA, 20 bp, Hepatitis GB virus B
ggacgagtgggctgatctct

SEQ ID NO: 56487 - DNA, 20 bp, Hepatitis GB virus B
cacattggaaaccgcccttg

SEQ ID NO: 56488 - DNA, 20 bp, Hepatitis GB virus B
acattggaaaccgcccttga

SEQ ID NO: 56489 - DNA, 20 bp, Hepatitis GB virus B
gaaaccgcccttgaaaaact

SEQ ID NO: 56490 - DNA, 20 bp, Hepatitis GB virus B
aaaaacttaacacctttctt

SEQ ID NO: 56491 - DNA, 20 bp, Hepatitis GB virus B
acacctttcttgggcctcat

SEQ ID NO: 56492 - DNA, 20 bp, Hepatitis GB virus B
cttgacatttaaatgcttga

SEQ ID NO: 56493 - DNA, 20 bp, Hepatitis GB virus B
acatttaaatgcttgatggg

SEQ ID NO: 56494 - DNA, 20 bp, Hepatitis GB virus B
aaatgcttgatgggtgagtg

SEQ ID NO: 56495 - DNA, 20 bp, Hepatitis GB virus B
aatgcttgatgggtgagtgg

SEQ ID NO: 56496 - DNA, 20 bp, Hepatitis GB virus B
atgggtgagtggcccactat

SEQ ID NO: 56497 - DNA, 20 bp, Hepatitis GB virus B
cagtcaacgctaggctgtgt

SEQ ID NO: 56498 - DNA, 20 bp, Hepatitis GB virus B
gactagtcttgtcgtcaatt

SEQ ID NO: 56499 - DNA, 20 bp, Hepatitis GB virus B
tcgtcaattatggcgttagg

SEQ ID NO: 56500 - DNA, 20 bp, Hepatitis GB virus B
tggcgttagggactactgta

SEQ ID NO: 56501 - DNA, 20 bp, Hepatitis GB virus B
acagtagtccctaacgccat

SEQ ID NO: 56502 - DNA, 20 bp, Hepatitis GB virus B
gaaggtccttcaaacctccc

SEQ ID NO: 56503 - DNA, 20 bp, Hepatitis GB virus B
aaacctccctccttcaccac

SEQ ID NO: 56504 - DNA, 20 bp, Hepatitis GB virus B
accacctgttctacagttgg

SEQ ID NO: 56505 - DNA, 20 bp, Hepatitis GB virus B
tacagttggccatgccgatg

SEQ ID NO: 56506 - DNA, 20 bp, Hepatitis GB virus B
gccatgccgatgcccctgtt

SEQ ID NO: 56507 - DNA, 20 bp, Hepatitis GB virus B
gtgcagcatgagctacacct

SEQ ID NO: 56508 - DNA, 20 bp, Hepatitis GB virus B
gcttcaaaactgcttctaaa

SEQ ID NO: 56509 - DNA, 20 bp, Hepatitis GB virus B
aaaactgcttctaaagttct

SEQ ID NO: 56510 - DNA, 20 bp, Hepatitis GB virus B
taaagttctgtctgcaactc

SEQ ID NO: 56511 - DNA, 20 bp, Hepatitis GB virus B
tgtctgcaactcgggccatc

SEQ ID NO: 56512 - DNA, 20 bp, Hepatitis GB virus B
ggggcactgatgttcgttct

SEQ ID NO: 56513 - DNA, 20 bp, Hepatitis GB virus B
gttctggagcagcccgcaag

SEQ ID NO: 56514 - DNA, 20 bp, Hepatitis GB virus B
tggagcagcccgcaaggctg

SEQ ID NO: 56515 - DNA, 20 bp, Hepatitis GB virus B
tggacttgcagaagtgtgtc

SEQ ID NO: 56516 - DNA, 20 bp, Hepatitis GB virus B
cagaagtgtgtcgaggcagg

SEQ ID NO: 56517 - DNA, 20 bp, Hepatitis GB virus B
tgacagtaccatcacacccg

SEQ ID NO: 56518 - DNA, 20 bp, Hepatitis GB virus B
gacagtaccatcacacccga

SEQ ID NO: 56519 - DNA, 20 bp, Hepatitis GB virus B
acagtaccatcacacccgag

SEQ ID NO: 56520 - DNA, 20 bp, Hepatitis GB virus B
gtcactgagtttagctgctg

SEQ ID NO: 56521 - DNA, 20 bp, Hepatitis GB virus B
agctgctgagtagatgtctg

SEQ ID NO: 56522 - DNA, 20 bp, Hepatitis GB virus B
cttatttgcggcgatgattg

SEQ ID NO: 56523 - DNA, 20 bp, Hepatitis GB virus B
tttgcggcgatgattgcacc

SEQ ID NO: 56524 - DNA, 20 bp, Hepatitis GB virus B
gcggcgatgattgcaccgta

SEQ ID NO: 56525 - DNA, 20 bp, Hepatitis GB virus B
cggcgatgattgcaccgtaa

SEQ ID NO: 56526 - DNA, 20 bp, Hepatitis GB virus B
caccgtaatttggaagagcg

SEQ ID NO: 56527 - DNA, 20 bp, Hepatitis GB virus B
gactggtatgggaaaaatta

SEQ ID NO: 56528 - DNA, 20 bp, Hepatitis GB virus B
actggtatgggaaaaattat

SEQ ID NO: 56529 - DNA, 20 bp, Hepatitis GB virus B
tacggtgcctgtagaagatc

SEQ ID NO: 56530 - DNA, 20 bp, Hepatitis GB virus B
ctggtgtgcacggtattgag

SEQ ID NO: 56531 - DNA, 20 bp, Hepatitis GB virus B
aggctttctcggtggtgcgc

SEQ ID NO: 56532 - DNA, 20 bp, Hepatitis GB virus B
ggataagacgagcgtggctc

SEQ ID NO: 56533 - DNA, 20 bp, Hepatitis GB virus B
gataagacgagcgtggctcg

SEQ ID NO: 56534 - DNA, 20 bp, Hepatitis GB virus B
caattattgtgatgtttact

SEQ ID NO: 56535 - DNA, 20 bp, Hepatitis GB virus B
aattattgtgatgtttactc

SEQ ID NO: 56536 - DNA, 20 bp, Hepatitis GB virus B
ttgtgatgtttactccccgg

SEQ ID NO: 56537 - DNA, 20 bp, Hepatitis GB virus B
acgaccccgccgatgtgagt

SEQ ID NO: 56538 - DNA, 20 bp, Hepatitis GB virus B
ggcgaccatggtggatcaga

SEQ ID NO: 56539 - DNA, 20 bp, Hepatitis GB virus B
gcgaccatggtggatcagaa

SEQ ID NO: 56540 - DNA, 20 bp, Hepatitis GB virus B
cgggtgaagccatggtctga

SEQ ID NO: 56541 - DNA, 20 bp, Hepatitis GB virus B
gggtgaagccatggtctgaa

SEQ ID NO: 56542 - DNA, 20 bp, Influenza A virus
cacaatatgcttcttcatgc

SEQ ID NO: 56543 - DNA, 20 bp, Influenza A virus
ttcatgcaaattgccatcct

SEQ ID NO: 56544 - DNA, 20 bp, Influenza A virus
atgcaaattgccatcctgat

SEQ ID NO: 56545 - DNA, 20 bp, Influenza A virus
ccatcctgataaccactgta

SEQ ID NO: 56546 - DNA, 20 bp, Influenza A virus
catttcaagcaatatgaatt

SEQ ID NO: 56547 - DNA, 20 bp, Influenza A virus
caggatttgcacctttttct

SEQ ID NO: 56548 - DNA, 20 bp, Influenza A virus
gcacctttttctaaggacaa

SEQ ID NO: 56549 - DNA, 20 bp, Influenza A virus
cacctttttctaaggacaat

SEQ ID NO: 56550 - DNA, 20 bp, Influenza A virus
ttctaaggacaattcgatta

SEQ ID NO: 56551 - DNA, 20 bp, Influenza A virus
tctaaggacaattcgattag

SEQ ID NO: 56552 - DNA, 20 bp, Influenza A virus
tcacgatggaaaagcatggc

SEQ ID NO: 56553 - DNA, 20 bp, Influenza A virus
gtgtaacgggggatgataaa

SEQ ID NO: 56554 - DNA, 20 bp, Influenza A virus
tgtaacgggggatgataaaa

SEQ ID NO: 56555 - DNA, 20 bp, Influenza A virus
taaatgaagctagcagttgc

SEQ ID NO: 56556 - DNA, 20 bp, Influenza A virus
catttttatcatcccccgtt

SEQ ID NO: 56557 - DNA, 20 bp, Influenza A virus
tcaggaagtgctcagcatgt

SEQ ID NO: 56558 - DNA, 20 bp, Influenza A virus
gagcctttccagttgtctct

SEQ ID NO: 56559 - DNA, 20 bp, Influenza A virus
ccagttgtctctgcagacac

SEQ ID NO: 56560 - DNA, 20 bp, Influenza A virus
cagttgtctctgcagacaca

SEQ ID NO: 56561 - DNA, 20 bp, Influenza A virus
tctctgcagacacatctgac

SEQ ID NO: 56562 - DNA, 20 bp, Influenza A virus
gatgatggaaatgacgtgtg

SEQ ID NO: 56563 - DNA, 20 bp, Influenza A virus
atgatggaaatgacgtgtgg

SEQ ID NO: 56564 - DNA, 20 bp, Influenza A virus
atatcctgagcgtaacttct

SEQ ID NO: 56565 - DNA, 20 bp, Influenza A virus
tcgctgatcgttcttcccat

SEQ ID NO: 56566 - DNA, 20 bp, Influenza A virus
ttcccatccacacgtcattt

SEQ ID NO: 56567 - DNA, 20 bp, Human papillomavirus
ttacaattgtttaactttat

SEQ ID NO: 56568 - DNA, 20 bp, Human papillomavirus
caattgtttaactttattgg

SEQ ID NO: 56569 - DNA, 20 bp, Human papillomavirus
tttaactttattggatactg

SEQ ID NO: 56570 - DNA, 20 bp, Human papillomavirus
aactttattggatactgctg

SEQ ID NO: 56571 - DNA, 20 bp, Human papillomavirus
actttattggatactgctga

SEQ ID NO: 56572 - DNA, 20 bp, Human papillomavirus
cggtacctgtaaagcaactg

SEQ ID NO: 56573 - DNA, 20 bp, Human papillomavirus
ttgctacttcaactgctgtt

SEQ ID NO: 56574 - DNA, 20 bp, Human papillomavirus
tgctacttcaactgctgttt

SEQ ID NO: 56575 - DNA, 20 bp, Human papillomavirus
gctacttcaactgctgtttg

SEQ ID NO: 56576 - DNA, 20 bp, Human papillomavirus
ctacttcaactgctgtttgc

SEQ ID NO: 56577 - DNA, 20 bp, Human papillomavirus
tgttatttctgaattgattg

SEQ ID NO: 56578 - DNA, 20 bp, Human papillomavirus
tttctgaattgattgatgat

SEQ ID NO: 56579 - DNA, 20 bp, Human papillomavirus
ctgaattgattgatgatgtg

SEQ ID NO: 56580 - DNA, 20 bp, Human papillomavirus
tgaattgattgatgatgtgg

SEQ ID NO: 56581 - DNA, 20 bp, Human papillomavirus
attgatgatgtggataatgc

SEQ ID NO: 56582 - DNA, 20 bp, Human papillomavirus
aggaagatgaaactgcaaat

SEQ ID NO: 56583 - DNA, 20 bp, Human papillomavirus
ctcaggtacaagctgatact

SEQ ID NO: 56584 - DNA, 20 bp, Human papillomavirus
tcaggtacaagctgatactc

SEQ ID NO: 56585 - DNA, 20 bp, Human papillomavirus
acaaatcaactgtttcatca

SEQ ID NO: 56586 - DNA, 20 bp, Human papillomavirus
catcagctcctgcgggtaca

SEQ ID NO: 56587 - DNA, 20 bp, Human papillomavirus
ttggctaatgcctttgatag

SEQ ID NO: 56588 - DNA, 20 bp, Human papillomavirus
tggctaatgcctttgataga

SEQ ID NO: 56589 - DNA, 20 bp, Human papillomavirus
ggctaatgcctttgatagat

SEQ ID NO: 56590 - DNA, 20 bp, Human papillomavirus
gctaatgcctttgatagatg

SEQ ID NO: 56591 - DNA, 20 bp, Human papillomavirus
gatagatggtaaaattggct

SEQ ID NO: 56592 - DNA, 20 bp, Human papillomavirus
acccaaccctctacctccgg

SEQ ID NO: 56593 - DNA, 20 bp, Human papillomavirus
ctcaacatcatcatcatcat

SEQ ID NO: 56594 - DNA, 20 bp, Human papillomavirus
aggaatctgcctcttctgca

SEQ ID NO: 56595 - DNA, 20 bp, Human papillomavirus
tgcagctcgtcgacgcttcg

SEQ ID NO: 56596 - DNA, 20 bp, Human papillomavirus
ggcgatggggtcttggagta

SEQ ID NO: 56597 - DNA, 20 bp, Human papillomavirus
tgaagtgggaacaggacatc

SEQ ID NO: 56598 - DNA, 20 bp, Human papillomavirus
cgcgacaagctcttggaaga

SEQ ID NO: 56599 - DNA, 20 bp, Human papillomavirus
gaagagttcagcgacttcaa

SEQ ID NO: 56600 - DNA, 20 bp, Human papillomavirus
agcgacttcaagctgaggct

SEQ ID NO: 56601 - DNA, 20 bp, Human papillomavirus
aagctgaggcttgggatcca

SEQ ID NO: 56602 - DNA, 20 bp, Human papillomavirus
tggtgttggggcttcaagta

SEQ ID NO: 56603 - DNA, 20 bp, Human papillomavirus
gggcttcaagtataaaacca

SEQ ID NO: 56604 - DNA, 20 bp, Human papillomavirus
aagtataaaaccaattcctg

SEQ ID NO: 56605 - DNA, 20 bp, Human papillomavirus
ctgaagcacttcctataccg

SEQ ID NO: 56606 - DNA, 20 bp, Human papillomavirus
ctataccggaaggtgcacca

SEQ ID NO: 56607 - DNA, 20 bp, Human papillomavirus
gacctttgaaagagatttac

SEQ ID NO: 56608 - DNA, 20 bp, Human papillomavirus
acctttgaaagagatttaca

SEQ ID NO: 56609 - DNA, 20 bp, Human papillomavirus
gaaagagatttacaggaggt

SEQ ID NO: 56610 - DNA, 20 bp, Human papillomavirus
aaagagatttacaggaggta

SEQ ID NO: 56611 - DNA, 20 bp, Human papillomavirus
acaggaggtagcagctgcac

SEQ ID NO: 56612 - DNA, 20 bp, Human papillomavirus
ttaataaagtgcttgacaca

SEQ ID NO: 56613 - DNA, 20 bp, Human papillomavirus
taataaagtgcttgacacag

SEQ ID NO: 56614 - DNA, 20 bp, Human papillomavirus
aataaagtgcttgacacaga

SEQ ID NO: 56615 - DNA, 20 bp, Human papillomavirus
ataaagtgcttgacacagaa

SEQ ID NO: 56616 - DNA, 20 bp, Human papillomavirus
acacagaaaatcctaatgct

SEQ ID NO: 56617 - DNA, 20 bp, Human papillomavirus
ggtgcagccaattttagacg

SEQ ID NO: 56618 - DNA, 20 bp, Human papillomavirus
gtgcagccaattttagacga

SEQ ID NO: 56619 - DNA, 20 bp, Human papillomavirus
tagacgattacaacaggaca

SEQ ID NO: 56620 - DNA, 20 bp, Human papillomavirus
agacgattacaacaggacaa

SEQ ID NO: 56621 - DNA, 20 bp, Human papillomavirus
gacgattacaacaggacaaa

SEQ ID NO: 56622 - DNA, 20 bp, Human papillomavirus
ctggtaagaaacttggcgcc

SEQ ID NO: 56623 - DNA, 20 bp, Human papillomavirus
tggtaagaaacttggcgcca

SEQ ID NO: 56624 - DNA, 20 bp, Human papillomavirus
gcgccaacggctattgcata

SEQ ID NO: 56625 - DNA, 20 bp, Human papillomavirus
cataccggttctggtacagt

SEQ ID NO: 56626 - DNA, 20 bp, Human papillomavirus
tggtacagtaataaagattt

SEQ ID NO: 56627 - DNA, 20 bp, Influenza A virus
ggaggaagagaatggtccta

SEQ ID NO: 56628 - DNA, 20 bp, Influenza A virus
ccctgggaatgtagaaaacc

SEQ ID NO: 56629 - DNA, 20 bp, Influenza A virus
ctctaggttttctacattcc

SEQ ID NO: 56630 - DNA, 20 bp, Influenza A virus
tctacattcccagggtaaca

SEQ ID NO: 56631 - DNA, 20 bp, Influenza A virus
ctacattcccagggtaacac

SEQ ID NO: 56632 - DNA, 20 bp, Influenza A virus
aagacgcccaatacacaaat

SEQ ID NO: 56633 - DNA, 20 bp, Influenza A virus
ttttcgtgtggggcatacat

SEQ ID NO: 56634 - DNA, 20 bp, Influenza A virus
tcgtgtggggcatacatcac

SEQ ID NO: 56635 - DNA, 20 bp, Influenza A virus
cgtgtggggcatacatcacc

SEQ ID NO: 56636 - DNA, 20 bp, Influenza A virus
gtgtggggcatacatcaccc

SEQ ID NO: 56637 - DNA, 20 bp, Influenza A virus
ctccatggtatggacacgtt

SEQ ID NO: 56638 - DNA, 20 bp, Influenza A virus
tttcaggagggagccatgga

SEQ ID NO: 56639 - DNA, 20 bp, Influenza A virus
caggagggagccatggaaga

SEQ ID NO: 56640 - DNA, 20 bp, Influenza A virus
aggagggagccatggaagaa

SEQ ID NO: 56641 - DNA, 20 bp, Influenza A virus
taaatcagtcttcaggattc

SEQ ID NO: 56642 - DNA, 20 bp, Influenza A virus
atagaaggaggttggccagg

SEQ ID NO: 56643 - DNA, 20 bp, Influenza A virus
gccaggactagtcgctggct

SEQ ID NO: 56644 - DNA, 20 bp, Influenza A virus
ccagcattcaaatgatcaag

SEQ ID NO: 56645 - DNA, 20 bp, Influenza A virus
cagcattcaaatgatcaagg

SEQ ID NO: 56646 - DNA, 20 bp, Influenza A virus
aaatgatcaaggggttggta

SEQ ID NO: 56647 - DNA, 20 bp, Influenza A virus
ctagtactacttgaaaatca

SEQ ID NO: 56648 - DNA, 20 bp, Influenza A virus
aaaatcaaaaaacactcgat

SEQ ID NO: 56649 - DNA, 20 bp, Influenza A virus
catagcattggagcccagtg

SEQ ID NO: 56650 - DNA, 20 bp, Influenza A virus
gagcccagtgccctcttcac

SEQ ID NO: 56651 - DNA, 20 bp, Influenza A virus
accttgttatatagattgtt

SEQ ID NO: 56652 - DNA, 20 bp, Hepatitis C virus
ccgggatgaccgggtccttt

SEQ ID NO: 56653 - DNA, 20 bp, Hepatitis C virus
cttggataaacccgctcaat

SEQ ID NO: 56654 - DNA, 20 bp, Hepatitis C virus
ttggataaacccgctcaatg

SEQ ID NO: 56655 - DNA, 20 bp, Hepatitis C virus
gataaacccgctcaatgccc

SEQ ID NO: 56656 - DNA, 20 bp, Hepatitis C virus
agcgggtttatccaagaaag

SEQ ID NO: 56657 - DNA, 20 bp, Hepatitis C virus
ccgggcggtggtcagatcgt

SEQ ID NO: 56658 - DNA, 20 bp, Hepatitis C virus
gtggagtttacttgttgccg

SEQ ID NO: 56659 - DNA, 20 bp, Hepatitis C virus
acttgttgccgcgcaggggc

SEQ ID NO: 56660 - DNA, 20 bp, Hepatitis C virus
cttgttgccgcgcaggggcc

SEQ ID NO: 56661 - DNA, 20 bp, Hepatitis C virus
ttgccgcgcaggggccctaa

SEQ ID NO: 56662 - DNA, 20 bp, Hepatitis C virus
ggagcagtcacggcccttct

SEQ ID NO: 56663 - DNA, 20 bp, Hepatitis C virus
ttcggagagccgttgactac

SEQ ID NO: 56664 - DNA, 20 bp, Hepatitis C virus
ggagagccgttgactactta

SEQ ID NO: 56665 - DNA, 20 bp, Hepatitis C virus
ggacccagcacctactgaca

SEQ ID NO: 56666 - DNA, 20 bp, Hepatitis C virus
gacccagcacctactgacat

SEQ ID NO: 56667 - DNA, 20 bp, Hepatitis C virus
tttctgtttgcaggagttga

SEQ ID NO: 56668 - DNA, 20 bp, Hepatitis C virus
ctgtttgcaggagttgatgg

SEQ ID NO: 56669 - DNA, 20 bp, Hepatitis C virus
tgtttgcaggagttgatggc

SEQ ID NO: 56670 - DNA, 20 bp, Hepatitis C virus
gcaggagttgatggccgcac

SEQ ID NO: 56671 - DNA, 20 bp, Hepatitis C virus
caggagttgatggccgcacc

SEQ ID NO: 56672 - DNA, 20 bp, Hepatitis C virus
ccgcattcgaccaaggctgg

SEQ ID NO: 56673 - DNA, 20 bp, Hepatitis C virus
gaccaaggctggggaactat

SEQ ID NO: 56674 - DNA, 20 bp, Hepatitis C virus
ctggcactatcccccacgac

SEQ ID NO: 56675 - DNA, 20 bp, Hepatitis C virus
tcatcactggggcccgatat

SEQ ID NO: 56676 - DNA, 20 bp, Hepatitis C virus
cccagccttggtcgaatgcg

SEQ ID NO: 56677 - DNA, 20 bp, Hepatitis C virus
ggctgcacctggatgaactc

SEQ ID NO: 56678 - DNA, 20 bp, Hepatitis C virus
gtgaagaattgcggagctcc

SEQ ID NO: 56679 - DNA, 20 bp, Hepatitis C virus
tgaagaattgcggagctccg

SEQ ID NO: 56680 - DNA, 20 bp, Hepatitis C virus
cggagctccgccctgcaact

SEQ ID NO: 56681 - DNA, 20 bp, Hepatitis C virus
gggccaacaggcaacaacag

SEQ ID NO: 56682 - DNA, 20 bp, Hepatitis C virus
aagacagagatagggccgag

SEQ ID NO: 56683 - DNA, 20 bp, Hepatitis C virus
agcccgctcctgcacaccac

SEQ ID NO: 56684 - DNA, 20 bp, Hepatitis C virus
ccgtgctccttcacacctac

SEQ ID NO: 56685 - DNA, 20 bp, Hepatitis C virus
acacctacgcccgctcttag

SEQ ID NO: 56686 - DNA, 20 bp, Hepatitis C virus
gcactggtcttatacaccta

SEQ ID NO: 56687 - DNA, 20 bp, Hepatitis C virus
tcctaaacgcggctgcggcc

SEQ ID NO: 56688 - DNA, 20 bp, Hepatitis C virus
ttctggggcctgctcgttgt

SEQ ID NO: 56689 - DNA, 20 bp, Hepatitis C virus
tggggcctgctcgttgtgtg

SEQ ID NO: 56690 - DNA, 20 bp, Hepatitis C virus
tgtgcttggcttggcatgtc

SEQ ID NO: 56691 - DNA, 20 bp, Hepatitis C virus
gcttggcatgtcaagggcag

SEQ ID NO: 56692 - DNA, 20 bp, Hepatitis C virus
caggttaagggtggtcgtga

SEQ ID NO: 56693 - DNA, 20 bp, Hepatitis C virus
agggtggtcgtgacgctgtc

SEQ ID NO: 56694 - DNA, 20 bp, Hepatitis C virus
caccctgccttggggtttga

SEQ ID NO: 56695 - DNA, 20 bp, Hepatitis C virus
gggtttgagatcacaaaaat

SEQ ID NO: 56696 - DNA, 20 bp, Hepatitis C virus
ttgtgatctcaaaccccaag

SEQ ID NO: 56697 - DNA, 20 bp, Hepatitis C virus
acggtggccacagaacccat

SEQ ID NO: 56698 - DNA, 20 bp, Hepatitis C virus
tccgcgatggagacgaaggt

SEQ ID NO: 56699 - DNA, 20 bp, Hepatitis C virus
ccacacgcggccgtgtcagc

SEQ ID NO: 56700 - DNA, 20 bp, Hepatitis C virus
gtctccatcgcggagaatac

SEQ ID NO: 56701 - DNA, 20 bp, Hepatitis C virus
tgtggccaccgttaattcgc

SEQ ID NO: 56702 - DNA, 20 bp, Hepatitis C virus
cttggcatttgtatcaatgg

SEQ ID NO: 56703 - DNA, 20 bp, Hepatitis C virus
ttggcatttgtatcaatgga

SEQ ID NO: 56704 - DNA, 20 bp, Hepatitis C virus
gcatttgtatcaatggagtg

SEQ ID NO: 56705 - DNA, 20 bp, Hepatitis C virus
gtatcaatggagtgatgtgg

SEQ ID NO: 56706 - DNA, 20 bp, Hepatitis C virus
tatcaatggagtgatgtgga

SEQ ID NO: 56707 - DNA, 20 bp, Hepatitis C virus
cgggcatgtggtaggtgttt

SEQ ID NO: 56708 - DNA, 20 bp, Hepatitis C virus
tcagggccgccgtgtgcacg

SEQ ID NO: 56709 - DNA, 20 bp, Hepatitis C virus
cagggccgccgtgtgcacgc

SEQ ID NO: 56710 - DNA, 20 bp, Hepatitis C virus
agggccgccgtgtgcacgcg

SEQ ID NO: 56711 - DNA, 20 bp, Hepatitis C virus
cgaaggcgctcgagttcgtc

SEQ ID NO: 56712 - DNA, 20 bp, Hepatitis C virus
ggactgtcaccaccggagcc

SEQ ID NO: 56713 - DNA, 20 bp, Hepatitis C virus
ccataagtagagtatgttat

SEQ ID NO: 56714 - DNA, 20 bp, Hepatitis C virus
taccggctccggtggtgaca

SEQ ID NO: 56715 - DNA, 20 bp, Hepatitis C virus
gggtccacgccgtatgctct

SEQ ID NO: 56716 - DNA, 20 bp, Hepatitis C virus
tgccactctaagaaaaaatg

SEQ ID NO: 56717 - DNA, 20 bp, Hepatitis C virus
ccaaacaattgaccagtctg

SEQ ID NO: 56718 - DNA, 20 bp, Hepatitis C virus
accagtctgggcgtgaatgc

SEQ ID NO: 56719 - DNA, 20 bp, Hepatitis C virus
tagaggtctagacgtcgccg

SEQ ID NO: 56720 - DNA, 20 bp, Hepatitis C virus
acgcccagactggtcaattg

SEQ ID NO: 56721 - DNA, 20 bp, Hepatitis C virus
cgtctggggagagaccgtcc

SEQ ID NO: 56722 - DNA, 20 bp, Hepatitis C virus
gtctggggagagaccgtccg

SEQ ID NO: 56723 - DNA, 20 bp, Hepatitis C virus
aactggccccactcccctcc

SEQ ID NO: 56724 - DNA, 20 bp, Hepatitis C virus
actggccccactcccctcct

SEQ ID NO: 56725 - DNA, 20 bp, Hepatitis C virus
agaatgagatcacactgaca

SEQ ID NO: 56726 - DNA, 20 bp, Hepatitis C virus
gtgatggggtgtgtcagtgt

SEQ ID NO: 56727 - DNA, 20 bp, Hepatitis C virus
tgaacggcccccagcctgta

SEQ ID NO: 56728 - DNA, 20 bp, Hepatitis C virus
atgtctttcaccgccgcggt

SEQ ID NO: 56729 - DNA, 20 bp, Hepatitis C virus
caccgccgcggtgacctccc

SEQ ID NO: 56730 - DNA, 20 bp, Hepatitis C virus
accgccgcggtgacctcccc

SEQ ID NO: 56731 - DNA, 20 bp, Hepatitis C virus
caacacatcagaccctcctt

SEQ ID NO: 56732 - DNA, 20 bp, Hepatitis C virus
ttaatattctaggagggtgg

SEQ ID NO: 56733 - DNA, 20 bp, Hepatitis C virus
gtgtcatatgcgccgccgtt

SEQ ID NO: 56734 - DNA, 20 bp, Hepatitis C virus
tgcggcgccacattggccca

SEQ ID NO: 56735 - DNA, 20 bp, Hepatitis C virus
gcccaggcgagggggctgta

SEQ ID NO: 56736 - DNA, 20 bp, Hepatitis C virus
atccactgtacagccccctc

SEQ ID NO: 56737 - DNA, 20 bp, Hepatitis C virus
ttctcatgccagaaggggta

SEQ ID NO: 56738 - DNA, 20 bp, Hepatitis C virus
tcatgccagaaggggtacaa

SEQ ID NO: 56739 - DNA, 20 bp, Hepatitis C virus
gtggagttcactccatcccc

SEQ ID NO: 56740 - DNA, 20 bp, Hepatitis C virus
actccatccccgcgccatac

SEQ ID NO: 56741 - DNA, 20 bp, Hepatitis C virus
taccccttctggcatgagaa

SEQ ID NO: 56742 - DNA, 20 bp, Hepatitis C virus
ttcacggagctggatggcgt

SEQ ID NO: 56743 - DNA, 20 bp, Hepatitis C virus
acggagctggatggcgtgag

SEQ ID NO: 56744 - DNA, 20 bp, Hepatitis C virus
accgcttcgcgccaccctgt

SEQ ID NO: 56745 - DNA, 20 bp, Hepatitis C virus
gcgccaccctgtaaccccct

SEQ ID NO: 56746 - DNA, 20 bp, Hepatitis C virus
ggagggggttacagggtggc

SEQ ID NO: 56747 - DNA, 20 bp, Hepatitis C virus
gcctttatgaggtctgcatc

SEQ ID NO: 56748 - DNA, 20 bp, Hepatitis C virus
atgaggtctgcatctgggtg

SEQ ID NO: 56749 - DNA, 20 bp, Hepatitis C virus
tgaggtctgcatctgggtgg

SEQ ID NO: 56750 - DNA, 20 bp, Hepatitis C virus
tatagtgcaggtggccttga

SEQ ID NO: 56751 - DNA, 20 bp, Hepatitis C virus
agagagggggctgagagctg

SEQ ID NO: 56752 - DNA, 20 bp, Hepatitis C virus
tgacccccctcaggtgtggg

SEQ ID NO: 56753 - DNA, 20 bp, Hepatitis C virus
cgcggaggaaaaggaagcca

SEQ ID NO: 56754 - DNA, 20 bp, Hepatitis C virus
cattggcttccttttcctcc

SEQ ID NO: 56755 - DNA, 20 bp, Hepatitis C virus
gcttccttttcctccgcgga

SEQ ID NO: 56756 - DNA, 20 bp, Hepatitis C virus
cttttcctccgcggaagcgg

SEQ ID NO: 56757 - DNA, 20 bp, Hepatitis C virus
ctccatgtcatacacctgga

SEQ ID NO: 56758 - DNA, 20 bp, Hepatitis C virus
ctctgctgaagaggaaaaat

SEQ ID NO: 56759 - DNA, 20 bp, Hepatitis C virus
agggattgatgggtaatttt

SEQ ID NO: 56760 - DNA, 20 bp, Hepatitis C virus
atgggtaatttttcctcttc

SEQ ID NO: 56761 - DNA, 20 bp, Hepatitis C virus
ttcctcttcagcagagcaag

SEQ ID NO: 56762 - DNA, 20 bp, Hepatitis C virus
acaccaccccactccgcccg

SEQ ID NO: 56763 - DNA, 20 bp, Hepatitis C virus
caagtacggatacggcgcga

SEQ ID NO: 56764 - DNA, 20 bp, Hepatitis C virus
gctctctcgacaagaaagcc

SEQ ID NO: 56765 - DNA, 20 bp, Hepatitis C virus
agcacatagagggtgtgtgg

SEQ ID NO: 56766 - DNA, 20 bp, Hepatitis C virus
ccacacaccctctatgtgct

SEQ ID NO: 56767 - DNA, 20 bp, Hepatitis C virus
tggccatctgcgagagccag

SEQ ID NO: 56768 - DNA, 20 bp, Hepatitis C virus
atcttcgtgtgtcccctggc

SEQ ID NO: 56769 - DNA, 20 bp, Hepatitis C virus
gtgtgtcccctggctctcgc

SEQ ID NO: 56770 - DNA, 20 bp, Hepatitis C virus
tgggctcggatagtgctgat

SEQ ID NO: 56771 - DNA, 20 bp, Hepatitis C virus
ttcagcgttctacagagcca

SEQ ID NO: 56772 - DNA, 20 bp, Hepatitis C virus
tcagcgttctacagagccag

SEQ ID NO: 56773 - DNA, 20 bp, Hepatitis C virus
cagcgttctacagagccagg

SEQ ID NO: 56774 - DNA, 20 bp, Hepatitis C virus
agcgttctacagagccagga

SEQ ID NO: 56775 - DNA, 20 bp, Hepatitis C virus
aactgggcggtgaagacaaa

SEQ ID NO: 56776 - DNA, 20 bp, Hepatitis C virus
gcgttttgtcttcaccgccc

SEQ ID NO: 56777 - DNA, 20 bp, Hepatitis C virus
cgttttgtcttcaccgccca

SEQ ID NO: 56778 - DNA, 20 bp, Hepatitis C virus
tgtcttcaccgcccagttga

SEQ ID NO: 56779 - DNA, 20 bp, Hepatitis C virus
gtcttcaccgcccagttgaa

SEQ ID NO: 56780 - DNA, 20 bp, Coronavirus
aaaatctgtgtagctgtcgc

SEQ ID NO: 56781 - DNA, 20 bp, Coronavirus
aaatctgtgtagctgtcgct

SEQ ID NO: 56782 - DNA, 20 bp, Coronavirus
tactgtcgttgacaagaaac

SEQ ID NO: 56783 - DNA, 20 bp, Coronavirus
actgtcgttgacaagaaacg

SEQ ID NO: 56784 - DNA, 20 bp, Coronavirus
ctgtcgttgacaagaaacga

SEQ ID NO: 56785 - DNA, 20 bp, Coronavirus
ggggactctgtggaagaggc

SEQ ID NO: 56786 - DNA, 20 bp, Coronavirus
tggtctagtagagctggaaa

SEQ ID NO: 56787 - DNA, 20 bp, Coronavirus
aacagccctatgtgttcatt

SEQ ID NO: 56788 - DNA, 20 bp, Coronavirus
attaaacgttctgatgcctt

SEQ ID NO: 56789 - DNA, 20 bp, Coronavirus
aggcatcagaacgtttaatg

SEQ ID NO: 56790 - DNA, 20 bp, Coronavirus
caaaggggaatgcccaaagt

SEQ ID NO: 56791 - DNA, 20 bp, Coronavirus
aaaggggaatgcccaaagtt

SEQ ID NO: 56792 - DNA, 20 bp, Coronavirus
gtgtttcctcttaactcaaa

SEQ ID NO: 56793 - DNA, 20 bp, Coronavirus
tgtttcctcttaactcaaaa

SEQ ID NO: 56794 - DNA, 20 bp, Coronavirus
cctcttaactcaaaagtcaa

SEQ ID NO: 56795 - DNA, 20 bp, Coronavirus
tggaggctgtgtgtttgcct

SEQ ID NO: 56796 - DNA, 20 bp, Coronavirus
ggaggctgtgtgtttgccta

SEQ ID NO: 56797 - DNA, 20 bp, Coronavirus
gaggctgtgtgtttgcctat

SEQ ID NO: 56798 - DNA, 20 bp, Coronavirus
gcctatgttggctgctataa

SEQ ID NO: 56799 - DNA, 20 bp, Coronavirus
cctatgttggctgctataat

SEQ ID NO: 56800 - DNA, 20 bp, Coronavirus
ccaagggaaagcccgtaaaa

SEQ ID NO: 56801 - DNA, 20 bp, Coronavirus
gaacattggacaacagagat

SEQ ID NO: 56802 - DNA, 20 bp, Coronavirus
gacaacagagatcagtttta

SEQ ID NO: 56803 - DNA, 20 bp, Coronavirus
taacaccactgtgtggtttt

SEQ ID NO: 56804 - DNA, 20 bp, Coronavirus
aacaccactgtgtggttttc

SEQ ID NO: 56805 - DNA, 20 bp, Coronavirus
agacctgctcaccaacagtg

SEQ ID NO: 56806 - DNA, 20 bp, Coronavirus
ttatggcatatgtaactggt

SEQ ID NO: 56807 - DNA, 20 bp, Coronavirus
tggcatatgtaactggtggt

SEQ ID NO: 56808 - DNA, 20 bp, Coronavirus
tacaacagacttctcagtgg

SEQ ID NO: 56809 - DNA, 20 bp, Coronavirus
tcagtggttgtctaatcttt

SEQ ID NO: 56810 - DNA, 20 bp, Coronavirus
atcaagtcactatcgctggc

SEQ ID NO: 56811 - DNA, 20 bp, Coronavirus
cgatcactcaacttaggtga

SEQ ID NO: 56812 - DNA, 20 bp, Coronavirus
ggtgaagtcttcatcgctca

SEQ ID NO: 56813 - DNA, 20 bp, Coronavirus
atcgctcaaagcaagggact

SEQ ID NO: 56814 - DNA, 20 bp, Coronavirus
accgtcagtgtatacgtggc

SEQ ID NO: 56815 - DNA, 20 bp, Coronavirus
gagattaaggacaaagaaca

SEQ ID NO: 56816 - DNA, 20 bp, Coronavirus
aggacaaagaacaatactgc

SEQ ID NO: 56817 - DNA, 20 bp, Coronavirus
tctcctggtttactggctac

SEQ ID NO: 56818 - DNA, 20 bp, Coronavirus
actggctacaaacaatgtct

SEQ ID NO: 56819 - DNA, 20 bp, Coronavirus
ctggctacaaacaatgtctt

SEQ ID NO: 56820 - DNA, 20 bp, Coronavirus
cttttaccctccagatgagg

SEQ ID NO: 56821 - DNA, 20 bp, Coronavirus
taccctccagatgaggaaga

SEQ ID NO: 56822 - DNA, 20 bp, Coronavirus
accctccagatgaggaagaa

SEQ ID NO: 56823 - DNA, 20 bp, Coronavirus
ccctccagatgaggaagaag

SEQ ID NO: 56824 - DNA, 20 bp, Coronavirus
atgaaacctgtgaacatgag

SEQ ID NO: 56825 - DNA, 20 bp, Coronavirus
taaatgctgctaacatacac

SEQ ID NO: 56826 - DNA, 20 bp, Coronavirus
gttgccttgttgagtgcacc

SEQ ID NO: 56827 - DNA, 20 bp, Coronavirus
ccttgttgagtgcacctgct

SEQ ID NO: 56828 - DNA, 20 bp, Coronavirus
ttgagtgcacctgctacacc

SEQ ID NO: 56829 - DNA, 20 bp, Coronavirus
agtgcacctgctacaccacc

SEQ ID NO: 56830 - DNA, 20 bp, Coronavirus
caccattgttgtcagcaggc

SEQ ID NO: 56831 - DNA, 20 bp, Coronavirus
ttgtcagcaggcatatttgg

SEQ ID NO: 56832 - DNA, 20 bp, Coronavirus
tcagcaggcatatttggtgc

SEQ ID NO: 56833 - DNA, 20 bp, Coronavirus
ggtgctaaaccacttcagtc

SEQ ID NO: 56834 - DNA, 20 bp, Coronavirus
gtgctaaaccacttcagtct

SEQ ID NO: 56835 - DNA, 20 bp, Coronavirus
ccttgagaaggatgcacctt

SEQ ID NO: 56836 - DNA, 20 bp, Coronavirus
cttgagaaggatgcacctta

SEQ ID NO: 56837 - DNA, 20 bp, Coronavirus
agaaggatgcaccttacatg

SEQ ID NO: 56838 - DNA, 20 bp, Coronavirus
catggtaggtgatgttatca

SEQ ID NO: 56839 - DNA, 20 bp, Coronavirus
tcactagtggtgatatcact

SEQ ID NO: 56840 - DNA, 20 bp, Coronavirus
ctcatgctgaagagacaaga

SEQ ID NO: 56841 - DNA, 20 bp, Coronavirus
atgcctatatgcatggatgt

SEQ ID NO: 56842 - DNA, 20 bp, Coronavirus
gagccataatggcaaccatc

SEQ ID NO: 56843 - DNA, 20 bp, Coronavirus
aattttaattcctttatact

SEQ ID NO: 56844 - DNA, 20 bp, Coronavirus
taattcctttatacttacgt

SEQ ID NO: 56845 - DNA, 20 bp, Coronavirus
ctacatataatggatacctc

SEQ ID NO: 56846 - DNA, 20 bp, Coronavirus
gtcatcaaagacatctgagg

SEQ ID NO: 56847 - DNA, 20 bp, Coronavirus
gtagaaacagtttctttggc

SEQ ID NO: 56848 - DNA, 20 bp, Coronavirus
tagaaacagtttctttggct

SEQ ID NO: 56849 - DNA, 20 bp, Coronavirus
ctacaaagtgctcctcagat

SEQ ID NO: 56850 - DNA, 20 bp, Coronavirus
ctttgtactacctagtgatg

SEQ ID NO: 56851 - DNA, 20 bp, Coronavirus
tttgtactacctagtgatga

SEQ ID NO: 56852 - DNA, 20 bp, Coronavirus
gtactacctagtgatgacac

SEQ ID NO: 56853 - DNA, 20 bp, Coronavirus
tactacctagtgatgacaca

SEQ ID NO: 56854 - DNA, 20 bp, Coronavirus
cgagtactaccatactcttg

SEQ ID NO: 56855 - DNA, 20 bp, Coronavirus
ttaatgtggtgtgtaaacat

SEQ ID NO: 56856 - DNA, 20 bp, Coronavirus
atgtggtgtgtaaacattgt

SEQ ID NO: 56857 - DNA, 20 bp, Coronavirus
tggtcagaaaactactacct

SEQ ID NO: 56858 - DNA, 20 bp, Coronavirus
acgggtgtagaagctgtgat

SEQ ID NO: 56859 - DNA, 20 bp, Coronavirus
tgataatcttaagacaggtg

SEQ ID NO: 56860 - DNA, 20 bp, Coronavirus
acggagctcaccttacaaag

SEQ ID NO: 56861 - DNA, 20 bp, Coronavirus
caaagatgtcagagtacaaa

SEQ ID NO: 56862 - DNA, 20 bp, Coronavirus
tctacaaggaaacatcttac

SEQ ID NO: 56863 - DNA, 20 bp, Coronavirus
ctacaaggaaacatcttaca

SEQ ID NO: 56864 - DNA, 20 bp, Coronavirus
tacaaggaaacatcttacac

SEQ ID NO: 56865 - DNA, 20 bp, Coronavirus
ttcccagacttgaatggcga

SEQ ID NO: 56866 - DNA, 20 bp, Coronavirus
ccagacttgaatggcgatgt

SEQ ID NO: 56867 - DNA, 20 bp, Coronavirus
aatggcgatgtagtggctat

SEQ ID NO: 56868 - DNA, 20 bp, Coronavirus
actatagacactattcagcg

SEQ ID NO: 56869 - DNA, 20 bp, Coronavirus
agcgagtttcaagaaaggtg

SEQ ID NO: 56870 - DNA, 20 bp, Coronavirus
taggcaatgtcatacttaaa

SEQ ID NO: 56871 - DNA, 20 bp, Coronavirus
aaccatcagatgaaggtgtt

SEQ ID NO: 56872 - DNA, 20 bp, Coronavirus
aagtaacacaagagttaggt

SEQ ID NO: 56873 - DNA, 20 bp, Coronavirus
ggtcatgaggatcttatggc

SEQ ID NO: 56874 - DNA, 20 bp, Coronavirus
tggctgcttatgtggaaaac

SEQ ID NO: 56875 - DNA, 20 bp, Coronavirus
gagaattgtatcttaattcg

SEQ ID NO: 56876 - DNA, 20 bp, Coronavirus
tatcttaattcgtctaacgt

SEQ ID NO: 56877 - DNA, 20 bp, Coronavirus
attcgtctaacgttactact

SEQ ID NO: 56878 - DNA, 20 bp, Coronavirus
gtctaacgttactactatgg

SEQ ID NO: 56879 - DNA, 20 bp, Coronavirus
ctactatggatttctgtgaa

SEQ ID NO: 56880 - DNA, 20 bp, Coronavirus
atcattagtattgtacaaat

SEQ ID NO: 56881 - DNA, 20 bp, Coronavirus
tcattagtattgtacaaatg

SEQ ID NO: 56882 - DNA, 20 bp, Coronavirus
gtattgtacaaatggcaccc

SEQ ID NO: 56883 - DNA, 20 bp, Coronavirus
tacaaatggcacccgtttct

SEQ ID NO: 56884 - DNA, 20 bp, Coronavirus
ctgcaatggttaggatgtac

SEQ ID NO: 56885 - DNA, 20 bp, Coronavirus
gtcactccagtttaaaagac

SEQ ID NO: 56886 - DNA, 20 bp, Coronavirus
tcactccagtttaaaagacc

SEQ ID NO: 56887 - DNA, 20 bp, Coronavirus
aaaagaccaatcaaccctac

SEQ ID NO: 56888 - DNA, 20 bp, Coronavirus
aaagaccaatcaaccctact

SEQ ID NO: 56889 - DNA, 20 bp, Coronavirus
ttgatagtgttgctgtgaaa

SEQ ID NO: 56890 - DNA, 20 bp, Coronavirus
tgtcgacaccttttcagcaa

SEQ ID NO: 56891 - DNA, 20 bp, Coronavirus
tcagcaacttttagtgttcc

SEQ ID NO: 56892 - DNA, 20 bp, Coronavirus
cagcaacttttagtgttcct

SEQ ID NO: 56893 - DNA, 20 bp, Coronavirus
agcaacttttagtgttccta

SEQ ID NO: 56894 - DNA, 20 bp, Coronavirus
tagtgttcctatggaaaaac

SEQ ID NO: 56895 - DNA, 20 bp, Coronavirus
cactcatctggaatgtaaaa

SEQ ID NO: 56896 - DNA, 20 bp, Coronavirus
actcatctggaatgtaaaag

SEQ ID NO: 56897 - DNA, 20 bp, Coronavirus
atctgaacagctgcgtaaac

SEQ ID NO: 56898 - DNA, 20 bp, Coronavirus
tctgaacagctgcgtaaaca

SEQ ID NO: 56899 - DNA, 20 bp, Coronavirus
gtagtgctgccaagaagaac

SEQ ID NO: 56900 - DNA, 20 bp, Coronavirus
aggatggtgtcactcgtgac

SEQ ID NO: 56901 - DNA, 20 bp, Coronavirus
ctactgatgattgttttgca

SEQ ID NO: 56902 - DNA, 20 bp, Coronavirus
tactgatgattgttttgcaa

SEQ ID NO: 56903 - DNA, 20 bp, Coronavirus
ttttgcaaataaacatgctg

SEQ ID NO: 56904 - DNA, 20 bp, Coronavirus
tgcaaataaacatgctggtt

SEQ ID NO: 56905 - DNA, 20 bp, Coronavirus
ttatgacactaatttgctag

SEQ ID NO: 56906 - DNA, 20 bp, Coronavirus
tgacactaatttgctagagg

SEQ ID NO: 56907 - DNA, 20 bp, Coronavirus
gctagagggttctatttctt

SEQ ID NO: 56908 - DNA, 20 bp, Coronavirus
ctagagggttctatttctta

SEQ ID NO: 56909 - DNA, 20 bp, Coronavirus
tatttcttatagtgagcttc

SEQ ID NO: 56910 - DNA, 20 bp, Coronavirus
agatgtgtctgcttcagtag

SEQ ID NO: 56911 - DNA, 20 bp, Coronavirus
gatgtgtctgcttcagtagt

SEQ ID NO: 56912 - DNA, 20 bp, Coronavirus
agtagtggctggtggtatta

SEQ ID NO: 56913 - DNA, 20 bp, Coronavirus
ttgccatattggtgacttgt

SEQ ID NO: 56914 - DNA, 20 bp, Coronavirus
ccatattggtgacttgtgct

SEQ ID NO: 56915 - DNA, 20 bp, Coronavirus
gtgtacctttttgctcaaca

SEQ ID NO: 56916 - DNA, 20 bp, Coronavirus
tgtacctttttgctcaacaa

SEQ ID NO: 56917 - DNA, 20 bp, Coronavirus
ttgctcaacaaggaaatgta

SEQ ID NO: 56918 - DNA, 20 bp, Coronavirus
tgctcaacaaggaaatgtac

SEQ ID NO: 56919 - DNA, 20 bp, Coronavirus
gctcaacaaggaaatgtacc

SEQ ID NO: 56920 - DNA, 20 bp, Coronavirus
tgctgttctgcagagtggtt

SEQ ID NO: 56921 - DNA, 20 bp, Coronavirus
tgcagagtggttttaggaaa

SEQ ID NO: 56922 - DNA, 20 bp, Coronavirus
taggaaaatggcattcccgt

SEQ ID NO: 56923 - DNA, 20 bp, Coronavirus
aggaaaatggcattcccgtc

SEQ ID NO: 56924 - DNA, 20 bp, Coronavirus
ggaaaatggcattcccgtca

SEQ ID NO: 56925 - DNA, 20 bp, Coronavirus
aagttgatacttctaaccct

SEQ ID NO: 56926 - DNA, 20 bp, Coronavirus
atacttctaaccctaagaca

SEQ ID NO: 56927 - DNA, 20 bp, Coronavirus
taaccctaagacacccaagt

SEQ ID NO: 56928 - DNA, 20 bp, Coronavirus
gtccgtatccaacctggtca

SEQ ID NO: 56929 - DNA, 20 bp, Coronavirus
tccgtatccaacctggtcaa

SEQ ID NO: 56930 - DNA, 20 bp, Coronavirus
aaccttgtggcaatgaagta

SEQ ID NO: 56931 - DNA, 20 bp, Coronavirus
accttgtggcaatgaagtac

SEQ ID NO: 56932 - DNA, 20 bp, Coronavirus
tggcaatgaagtacaactat

SEQ ID NO: 56933 - DNA, 20 bp, Coronavirus
gacacaagatcatgttgaca

SEQ ID NO: 56934 - DNA, 20 bp, Coronavirus
acacaagatcatgttgacat

SEQ ID NO: 56935 - DNA, 20 bp, Coronavirus
cttgacatcactattgattc

SEQ ID NO: 56936 - DNA, 20 bp, Coronavirus
ttgacatcactattgattct

SEQ ID NO: 56937 - DNA, 20 bp, Coronavirus
acatcactattgattcttgt

SEQ ID NO: 56938 - DNA, 20 bp, Coronavirus
attcttgttcaaagtacaca

SEQ ID NO: 56939 - DNA, 20 bp, Coronavirus
ttgttcaaagtacacagtgg

SEQ ID NO: 56940 - DNA, 20 bp, Coronavirus
ccatgtgggccttagttatt

SEQ ID NO: 56941 - DNA, 20 bp, Coronavirus
catgtgggccttagttattt

SEQ ID NO: 56942 - DNA, 20 bp, Coronavirus
gttatttctgtaacctctaa

SEQ ID NO: 56943 - DNA, 20 bp, Coronavirus
tttctgtaacctctaactat

SEQ ID NO: 56944 - DNA, 20 bp, Coronavirus
ctgtaacctctaactattct

SEQ ID NO: 56945 - DNA, 20 bp, Coronavirus
tgcctcctaagagtagtatt

SEQ ID NO: 56946 - DNA, 20 bp, Coronavirus
gcctcctaagagtagtattg

SEQ ID NO: 56947 - DNA, 20 bp, Coronavirus
cctcctaagagtagtattga

SEQ ID NO: 56948 - DNA, 20 bp, Coronavirus
atgctttcaagcttaacatt

SEQ ID NO: 56949 - DNA, 20 bp, Coronavirus
caagcttaacattaagttgt

SEQ ID NO: 56950 - DNA, 20 bp, Coronavirus
tgctatccatgcagggtgct

SEQ ID NO: 56951 - DNA, 20 bp, Coronavirus
gctatccatgcagggtgctg

SEQ ID NO: 56952 - DNA, 20 bp, Coronavirus
ctatccatgcagggtgctgt

SEQ ID NO: 56953 - DNA, 20 bp, Coronavirus
ataggttgtgcgaggaaatg

SEQ ID NO: 56954 - DNA, 20 bp, Coronavirus
tgcgaggaaatgctcgataa

SEQ ID NO: 56955 - DNA, 20 bp, Coronavirus
actatgcttaggaagcttga

SEQ ID NO: 56956 - DNA, 20 bp, Coronavirus
ggaagcttgataatgatgca

SEQ ID NO: 56957 - DNA, 20 bp, Coronavirus
agtgcatcattatcaagctt

SEQ ID NO: 56958 - DNA, 20 bp, Coronavirus
tcaagcttcctaagcatagt

SEQ ID NO: 56959 - DNA, 20 bp, Coronavirus
ctaagcatagtgaagagcat

SEQ ID NO: 56960 - DNA, 20 bp, Coronavirus
aactacagaataatgaactg

SEQ ID NO: 56961 - DNA, 20 bp, Coronavirus
tcatcagtacaagctgtttg

SEQ ID NO: 56962 - DNA, 20 bp, Coronavirus
gtgtggtaccagccgcacag

SEQ ID NO: 56963 - DNA, 20 bp, Coronavirus
tgtggtaccagccgcacagg

SEQ ID NO: 56964 - DNA, 20 bp, Coronavirus
attattctgtagtttaacag

SEQ ID NO: 56965 - DNA, 20 bp, Coronavirus
agctgctacagtacgtcttc

SEQ ID NO: 56966 - DNA, 20 bp, Coronavirus
gctgctacagtacgtcttca

SEQ ID NO: 56967 - DNA, 20 bp, Coronavirus
aggctggaaatgctacagaa

SEQ ID NO: 56968 - DNA, 20 bp, Coronavirus
aactgtgctttccttctgtg

SEQ ID NO: 56969 - DNA, 20 bp, Coronavirus
ccttctgtgcttttgcagta

SEQ ID NO: 56970 - DNA, 20 bp, Coronavirus
tgctaatgacccagtgggtt

SEQ ID NO: 56971 - DNA, 20 bp, Coronavirus
tacacttagaaacacagtct

SEQ ID NO: 56972 - DNA, 20 bp, Coronavirus
acacttagaaacacagtctg

SEQ ID NO: 56973 - DNA, 20 bp, Coronavirus
cacttagaaacacagtctgt

SEQ ID NO: 56974 - DNA, 20 bp, Coronavirus
gaaacacagtctgtaccgtc

SEQ ID NO: 56975 - DNA, 20 bp, Coronavirus
ctgtccatgactttttcaag

SEQ ID NO: 56976 - DNA, 20 bp, Coronavirus
ttcaagtttagagtagatgg

SEQ ID NO: 56977 - DNA, 20 bp, Coronavirus
tcaagtttagagtagatggt

SEQ ID NO: 56978 - DNA, 20 bp, Coronavirus
caagtttagagtagatggtg

SEQ ID NO: 56979 - DNA, 20 bp, Coronavirus
aagtttagagtagatggtga

SEQ ID NO: 56980 - DNA, 20 bp, Coronavirus
tgcgatgctatgcgtgatgc

SEQ ID NO: 56981 - DNA, 20 bp, Coronavirus
taggcgtactgacattagat

SEQ ID NO: 56982 - DNA, 20 bp, Coronavirus
gataatcaggatcttaatgg

SEQ ID NO: 56983 - DNA, 20 bp, Coronavirus
atgggaactggtacgatttc

SEQ ID NO: 56984 - DNA, 20 bp, Coronavirus
cggtgatttcgtacaagtag

SEQ ID NO: 56985 - DNA, 20 bp, Coronavirus
ggaccagacataccatccca

SEQ ID NO: 56986 - DNA, 20 bp, Coronavirus
tattaactgtttggatgata

SEQ ID NO: 56987 - DNA, 20 bp, Coronavirus
actgtttggatgataggtgt

SEQ ID NO: 56988 - DNA, 20 bp, Coronavirus
ggatgataggtgtatccttc

SEQ ID NO: 56989 - DNA, 20 bp, Coronavirus
gatgataggtgtatccttca

SEQ ID NO: 56990 - DNA, 20 bp, Coronavirus
tcagtagctgcactaacaaa

SEQ ID NO: 56991 - DNA, 20 bp, Coronavirus
cagtagctgcactaacaaac

SEQ ID NO: 56992 - DNA, 20 bp, Coronavirus
agtagctgcactaacaaaca

SEQ ID NO: 56993 - DNA, 20 bp, Coronavirus
cttttcaaactgtcaaaccc

SEQ ID NO: 56994 - DNA, 20 bp, Coronavirus
tcaaactgtcaaacccggta

SEQ ID NO: 56995 - DNA, 20 bp, Coronavirus
gtgcaaagaatagagctcgc

SEQ ID NO: 56996 - DNA, 20 bp, Coronavirus
catcagaaattattgaagtc

SEQ ID NO: 56997 - DNA, 20 bp, Coronavirus
atcagaaattattgaagtca

SEQ ID NO: 56998 - DNA, 20 bp, Coronavirus
ttgaagtcaatagccgccac

SEQ ID NO: 56999 - DNA, 20 bp, Coronavirus
aagtcaatagccgccactag

SEQ ID NO: 57000 - DNA, 20 bp, Coronavirus
ctgtaacttatcacaccgtt

SEQ ID NO: 57001 - DNA, 20 bp, Coronavirus
tcacaccgtttctacaggtt

SEQ ID NO: 57002 - DNA, 20 bp, Coronavirus
ctacaggttagctaacgagt

SEQ ID NO: 57003 - DNA, 20 bp, Coronavirus
tacaggttagctaacgagtg

SEQ ID NO: 57004 - DNA, 20 bp, Coronavirus
gctaacgagtgtgcgcaagt

SEQ ID NO: 57005 - DNA, 20 bp, Coronavirus
tacgcttacctgcgtaaaca

SEQ ID NO: 57006 - DNA, 20 bp, Coronavirus
acgcttacctgcgtaaacat

SEQ ID NO: 57007 - DNA, 20 bp, Coronavirus
cgcttacctgcgtaaacatt

SEQ ID NO: 57008 - DNA, 20 bp, Coronavirus
cctgcgtaaacatttctcca

SEQ ID NO: 57009 - DNA, 20 bp, Coronavirus
ctccatgatgattctttctg

SEQ ID NO: 57010 - DNA, 20 bp, Coronavirus
atgcttacccacttacaaaa

SEQ ID NO: 57011 - DNA, 20 bp, Coronavirus
cccacttacaaaacatccta

SEQ ID NO: 57012 - DNA, 20 bp, Coronavirus
caaaacatcctaatcaggag

SEQ ID NO: 57013 - DNA, 20 bp, Coronavirus
cacttgtatttacaatacat

SEQ ID NO: 57014 - DNA, 20 bp, Coronavirus
acttgtatttacaatacatt

SEQ ID NO: 57015 - DNA, 20 bp, Coronavirus
caacatcacacaaattagtg

SEQ ID NO: 57016 - DNA, 20 bp, Coronavirus
aacatcacacaaattagtgt

SEQ ID NO: 57017 - DNA, 20 bp, Coronavirus
gtgttgtctgttaatcccta

SEQ ID NO: 57018 - DNA, 20 bp, Coronavirus
tctgttaatccctatgtttg

SEQ ID NO: 57019 - DNA, 20 bp, Coronavirus
atccctatgtttgcaatgcc

SEQ ID NO: 57020 - DNA, 20 bp, Coronavirus
tcgcagcagaaacgctcaaa

SEQ ID NO: 57021 - DNA, 20 bp, Coronavirus
cgcagcagaaacgctcaaag

SEQ ID NO: 57022 - DNA, 20 bp, Coronavirus
gcagcagaaacgctcaaagc

SEQ ID NO: 57023 - DNA, 20 bp, Coronavirus
aagctgtcatatggtattgc

SEQ ID NO: 57024 - DNA, 20 bp, Coronavirus
agctgtcatatggtattgcc

SEQ ID NO: 57025 - DNA, 20 bp, Coronavirus
ctggcttgtacccaacactc

SEQ ID NO: 57026 - DNA, 20 bp, Coronavirus
tacccaacactcaacatctc

SEQ ID NO: 57027 - DNA, 20 bp, Coronavirus
tctagcaatgttgcaaatta

SEQ ID NO: 57028 - DNA, 20 bp, Coronavirus
ctagcaatgttgcaaattat

SEQ ID NO: 57029 - DNA, 20 bp, Coronavirus
tagcaatgttgcaaattatc

SEQ ID NO: 57030 - DNA, 20 bp, Coronavirus
tagtctttgatgaaatctct

SEQ ID NO: 57031 - DNA, 20 bp, Coronavirus
gatgaaatctctatggctac

SEQ ID NO: 57032 - DNA, 20 bp, Coronavirus
atgaaatctctatggctact

SEQ ID NO: 57033 - DNA, 20 bp, Coronavirus
tgacttgagtgttgtcaatg

SEQ ID NO: 57034 - DNA, 20 bp, Coronavirus
agtgttgtcaatgctagact

SEQ ID NO: 57035 - DNA, 20 bp, Coronavirus
aaaatgttctacaaaggtgt

SEQ ID NO: 57036 - DNA, 20 bp, Coronavirus
tacaaaggtgttattacaca

SEQ ID NO: 57037 - DNA, 20 bp, Coronavirus
ttacacatgatgtttcatct

SEQ ID NO: 57038 - DNA, 20 bp, Coronavirus
cacatgatgtttcatctgca

SEQ ID NO: 57039 - DNA, 20 bp, Coronavirus
catctgcaatcaacagacct

SEQ ID NO: 57040 - DNA, 20 bp, Coronavirus
atgacaaactgcaatttaca

SEQ ID NO: 57041 - DNA, 20 bp, Coronavirus
tgacaaactgcaatttacaa

SEQ ID NO: 57042 - DNA, 20 bp, Coronavirus
acaagtctagaaataccacg

SEQ ID NO: 57043 - DNA, 20 bp, Coronavirus
caagtctagaaataccacgt

SEQ ID NO: 57044 - DNA, 20 bp, Coronavirus
caagcagaaaatgtaactgg

SEQ ID NO: 57045 - DNA, 20 bp, Coronavirus
gtcacgttcgtgcgtggatt

SEQ ID NO: 57046 - DNA, 20 bp, Coronavirus
gtgcgtggattggctttgat

SEQ ID NO: 57047 - DNA, 20 bp, Coronavirus
gctttgatgtagagggctgt

SEQ ID NO: 57048 - DNA, 20 bp, Coronavirus
gatgtagagggctgtcatgc

SEQ ID NO: 57049 - DNA, 20 bp, Coronavirus
atgtagagggctgtcatgca

SEQ ID NO: 57050 - DNA, 20 bp, Coronavirus
tcagacagagtcgtgttcgt

SEQ ID NO: 57051 - DNA, 20 bp, Coronavirus
gtcctttgggcgcatggctt

SEQ ID NO: 57052 - DNA, 20 bp, Coronavirus
gggcgcatggctttgagctt

SEQ ID NO: 57053 - DNA, 20 bp, Coronavirus
ggcgcatggctttgagctta

SEQ ID NO: 57054 - DNA, 20 bp, Coronavirus
gagcttacatcaatgaagta

SEQ ID NO: 57055 - DNA, 20 bp, Coronavirus
attctgcttgcagaaaagta

SEQ ID NO: 57056 - DNA, 20 bp, Coronavirus
tgcttgcagaaaagtacaac

SEQ ID NO: 57057 - DNA, 20 bp, Coronavirus
cagaaaagtacaacacatgg

SEQ ID NO: 57058 - DNA, 20 bp, Coronavirus
tgaagtctgcattgcttgct

SEQ ID NO: 57059 - DNA, 20 bp, Coronavirus
cttgctgataagtttccagt

SEQ ID NO: 57060 - DNA, 20 bp, Coronavirus
gacacaagagtcttgtcaaa

SEQ ID NO: 57061 - DNA, 20 bp, Coronavirus
acacaagagtcttgtcaaac

SEQ ID NO: 57062 - DNA, 20 bp, Coronavirus
tcaaacttgaacttaccagg

SEQ ID NO: 57063 - DNA, 20 bp, Coronavirus
aacttaccaggctgtgatgg

SEQ ID NO: 57064 - DNA, 20 bp, Coronavirus
ccaggctgtgatggtggtag

SEQ ID NO: 57065 - DNA, 20 bp, Coronavirus
acaaacaatttgatacttat

SEQ ID NO: 57066 - DNA, 20 bp, Coronavirus
caaacaatttgatacttata

SEQ ID NO: 57067 - DNA, 20 bp, Coronavirus
gatacttataacctgtggaa

SEQ ID NO: 57068 - DNA, 20 bp, Coronavirus
atacttataacctgtggaat

SEQ ID NO: 57069 - DNA, 20 bp, Coronavirus
taacctgtggaatacattta

SEQ ID NO: 57070 - DNA, 20 bp, Coronavirus
ccaagaaacctactgagagt

SEQ ID NO: 57071 - DNA, 20 bp, Coronavirus
ttcttcacttactgtcttgt

SEQ ID NO: 57072 - DNA, 20 bp, Coronavirus
ttcacttactgtcttgtttg

SEQ ID NO: 57073 - DNA, 20 bp, Coronavirus
acttactgtcttgtttgatg

SEQ ID NO: 57074 - DNA, 20 bp, Coronavirus
ctgtcttgtttgatggtaga

SEQ ID NO: 57075 - DNA, 20 bp, Coronavirus
ctcgagctcgctatggatga

SEQ ID NO: 57076 - DNA, 20 bp, Coronavirus
tcgagctcgctatggatgaa

SEQ ID NO: 57077 - DNA, 20 bp, Coronavirus
atacagcgatataagctcga

SEQ ID NO: 57078 - DNA, 20 bp, Coronavirus
gaacacatcgtttatggaga

SEQ ID NO: 57079 - DNA, 20 bp, Coronavirus
atggagatttcagtcatgga

SEQ ID NO: 57080 - DNA, 20 bp, Coronavirus
caaaagtggtcaaggttaca

SEQ ID NO: 57081 - DNA, 20 bp, Coronavirus
aaaagtggtcaaggttacaa

SEQ ID NO: 57082 - DNA, 20 bp, Coronavirus
caattgactatgctgaaatt

SEQ ID NO: 57083 - DNA, 20 bp, Coronavirus
actatgctgaaatttcattc

SEQ ID NO: 57084 - DNA, 20 bp, Coronavirus
cattcatgctttggtgtaag

SEQ ID NO: 57085 - DNA, 20 bp, Coronavirus
tcgattcagatcttaatgac

SEQ ID NO: 57086 - DNA, 20 bp, Coronavirus
agatcttaatgacttcgtct

SEQ ID NO: 57087 - DNA, 20 bp, Coronavirus
atgacttcgtctccgacgca

SEQ ID NO: 57088 - DNA, 20 bp, Coronavirus
gtctccgacgcagattctac

SEQ ID NO: 57089 - DNA, 20 bp, Coronavirus
tactttaattggagactgtg

SEQ ID NO: 57090 - DNA, 20 bp, Coronavirus
ttaattggggctaactatct

SEQ ID NO: 57091 - DNA, 20 bp, Coronavirus
taattggggctaactatctt

SEQ ID NO: 57092 - DNA, 20 bp, Coronavirus
aattggggctaactatcttg

SEQ ID NO: 57093 - DNA, 20 bp, Coronavirus
attggggctaactatcttgg

SEQ ID NO: 57094 - DNA, 20 bp, Coronavirus
gggctaactatcttggcaag

SEQ ID NO: 57095 - DNA, 20 bp, Coronavirus
ctttgctgtttctaaaccca

SEQ ID NO: 57096 - DNA, 20 bp, Coronavirus
tttgctgtttctaaacccat

SEQ ID NO: 57097 - DNA, 20 bp, Coronavirus
gctgtttctaaacccatggg

SEQ ID NO: 57098 - DNA, 20 bp, Coronavirus
ctgtttctaaacccatgggt

SEQ ID NO: 57099 - DNA, 20 bp, Coronavirus
ctaaacccatgggtacacag

SEQ ID NO: 57100 - DNA, 20 bp, Coronavirus
ggggcacgtcagctgcagcc

SEQ ID NO: 57101 - DNA, 20 bp, Coronavirus
gggcacgtcagctgcagcct

SEQ ID NO: 57102 - DNA, 20 bp, Coronavirus
tgttggctatttaaagccaa

SEQ ID NO: 57103 - DNA, 20 bp, Coronavirus
gttggctatttaaagccaac

SEQ ID NO: 57104 - DNA, 20 bp, Coronavirus
ttggctatttaaagccaact

SEQ ID NO: 57105 - DNA, 20 bp, Coronavirus
aagtgctatggcgtttctgc

SEQ ID NO: 57106 - DNA, 20 bp, Coronavirus
agtgctatggcgtttctgcc

SEQ ID NO: 57107 - DNA, 20 bp, Coronavirus
ctgccactaagttgaatgat

SEQ ID NO: 57108 - DNA, 20 bp, Coronavirus
tgccactaagttgaatgatc

SEQ ID NO: 57109 - DNA, 20 bp, Coronavirus
aatgatctttgcttctccaa

SEQ ID NO: 57110 - DNA, 20 bp, Coronavirus
ctcccctgatggcaaacctt

SEQ ID NO: 57111 - DNA, 20 bp, Coronavirus
tcccctgatggcaaaccttg

SEQ ID NO: 57112 - DNA, 20 bp, Coronavirus
caccccacctgctcttaatt

SEQ ID NO: 57113 - DNA, 20 bp, Coronavirus
attgttattggccattaaat

SEQ ID NO: 57114 - DNA, 20 bp, Coronavirus
ttattggccattaaatgatt

SEQ ID NO: 57115 - DNA, 20 bp, Coronavirus
cgcttttgggggtgtaagtg

SEQ ID NO: 57116 - DNA, 20 bp, Coronavirus
tgggggtgtaagtgtaatta

SEQ ID NO: 57117 - DNA, 20 bp, Coronavirus
gggggtgtaagtgtaattac

SEQ ID NO: 57118 - DNA, 20 bp, Coronavirus
ggggtgtaagtgtaattaca

SEQ ID NO: 57119 - DNA, 20 bp, Coronavirus
cacctggaacaaatgcttca

SEQ ID NO: 57120 - DNA, 20 bp, Coronavirus
tactatgtctttaggtgctg

SEQ ID NO: 57121 - DNA, 20 bp, Coronavirus
aggtgctgatagttcaattg

SEQ ID NO: 57122 - DNA, 20 bp, Coronavirus
ggtgctgatagttcaattgc

SEQ ID NO: 57123 - DNA, 20 bp, Coronavirus
aattgcttactctaataaca

SEQ ID NO: 57124 - DNA, 20 bp, Coronavirus
cttactctaataacaccatt

SEQ ID NO: 57125 - DNA, 20 bp, Coronavirus
ctctttaataaggtgacact

SEQ ID NO: 57126 - DNA, 20 bp, Coronavirus
aataaggtgacactcgctga

SEQ ID NO: 57127 - DNA, 20 bp, Coronavirus
ataaggtgacactcgctgat

SEQ ID NO: 57128 - DNA, 20 bp, Coronavirus
atgaagcaatatggcgaatg

SEQ ID NO: 57129 - DNA, 20 bp, Coronavirus
atgctagagatctcatttgt

SEQ ID NO: 57130 - DNA, 20 bp, Coronavirus
aacaaggcgattagtcaaat

SEQ ID NO: 57131 - DNA, 20 bp, Coronavirus
acaaggcgattagtcaaatt

SEQ ID NO: 57132 - DNA, 20 bp, Coronavirus
gtcaaattcaagaatcactt

SEQ ID NO: 57133 - DNA, 20 bp, Coronavirus
aagaatcacttacaacaaca

SEQ ID NO: 57134 - DNA, 20 bp, Coronavirus
caacaacatcaactgcattg

SEQ ID NO: 57135 - DNA, 20 bp, Coronavirus
acttttgtggaaagggctac

SEQ ID NO: 57136 - DNA, 20 bp, Coronavirus
tgtggaaagggctaccacct

SEQ ID NO: 57137 - DNA, 20 bp, Coronavirus
gtggaaagggctaccacctt

SEQ ID NO: 57138 - DNA, 20 bp, Coronavirus
tggaaagggctaccacctta

SEQ ID NO: 57139 - DNA, 20 bp, Coronavirus
tgtccttcccacaagcagcc

SEQ ID NO: 57140 - DNA, 20 bp, Coronavirus
atgatcctctgcaacctgag

SEQ ID NO: 57141 - DNA, 20 bp, Coronavirus
tgatcctctgcaacctgagc

SEQ ID NO: 57142 - DNA, 20 bp, Coronavirus
actcattcaaagaagagctg

SEQ ID NO: 57143 - DNA, 20 bp, Coronavirus
aaagaagagctggacaagta

SEQ ID NO: 57144 - DNA, 20 bp, Coronavirus
aaaaatcatacatcaccaga

SEQ ID NO: 57145 - DNA, 20 bp, Coronavirus
ctttgttgcatgactagttg

SEQ ID NO: 57146 - DNA, 20 bp, Coronavirus
gttgcatgactagttgttgc

SEQ ID NO: 57147 - DNA, 20 bp, Coronavirus
ttgcatgactagttgttgca

SEQ ID NO: 57148 - DNA, 20 bp, Coronavirus
catgactagttgttgcagtt

SEQ ID NO: 57149 - DNA, 20 bp, Coronavirus
ttgcagttgcctcaagggtg

SEQ ID NO: 57150 - DNA, 20 bp, Coronavirus
cgctcaataaaagatggcag

SEQ ID NO: 57151 - DNA, 20 bp, Coronavirus
ataagggcttccagttcatt

SEQ ID NO: 57152 - DNA, 20 bp, Coronavirus
taagggcttccagttcattt

SEQ ID NO: 57153 - DNA, 20 bp, Coronavirus
cagttcatttgcaatttact

SEQ ID NO: 57154 - DNA, 20 bp, Coronavirus
atttgcaatttactgctgct

SEQ ID NO: 57155 - DNA, 20 bp, Coronavirus
aagactatgtcgttgtacat

SEQ ID NO: 57156 - DNA, 20 bp, Coronavirus
tacatggctatttcaccgaa

SEQ ID NO: 57157 - DNA, 20 bp, Coronavirus
caccgaagtttactaccagc

SEQ ID NO: 57158 - DNA, 20 bp, Coronavirus
accgaagtttactaccagct

SEQ ID NO: 57159 - DNA, 20 bp, Coronavirus
actaccagcttgagtctaca

SEQ ID NO: 57160 - DNA, 20 bp, Coronavirus
atagttaatagcgtacttct

SEQ ID NO: 57161 - DNA, 20 bp, Coronavirus
atagcgtacttctttttctt

SEQ ID NO: 57162 - DNA, 20 bp, Coronavirus
tttttcttgctttcgtggta

SEQ ID NO: 57163 - DNA, 20 bp, Coronavirus
ttcttgctttcgtggtattc

SEQ ID NO: 57164 - DNA, 20 bp, Coronavirus
tcttgctttcgtggtattct

SEQ ID NO: 57165 - DNA, 20 bp, Coronavirus
cctattcctagcctggatta

SEQ ID NO: 57166 - DNA, 20 bp, Coronavirus
ctattcctagcctggattat

SEQ ID NO: 57167 - DNA, 20 bp, Coronavirus
ctagcctggattatgttact

SEQ ID NO: 57168 - DNA, 20 bp, Coronavirus
tgttactacaatttgcctat

SEQ ID NO: 57169 - DNA, 20 bp, Coronavirus
ctacaatttgcctattctaa

SEQ ID NO: 57170 - DNA, 20 bp, Coronavirus
gtggtcacttgcgaatggcc

SEQ ID NO: 57171 - DNA, 20 bp, Coronavirus
cgaatggccggacactccct

SEQ ID NO: 57172 - DNA, 20 bp, Coronavirus
aggacctgccaaaagagatc

SEQ ID NO: 57173 - DNA, 20 bp, Coronavirus
cttattacaaattaggagcg

SEQ ID NO: 57174 - DNA, 20 bp, Coronavirus
ttattacaaattaggagcgt

SEQ ID NO: 57175 - DNA, 20 bp, Coronavirus
attgtatttacatcttgcga

SEQ ID NO: 57176 - DNA, 20 bp, Coronavirus
tatttacatcttgcgagcta

SEQ ID NO: 57177 - DNA, 20 bp, Coronavirus
acatcttgcgagctatatca

SEQ ID NO: 57178 - DNA, 20 bp, Coronavirus
catcttgcgagctatatcac

SEQ ID NO: 57179 - DNA, 20 bp, Coronavirus
cgagctatatcactatcagg

SEQ ID NO: 57180 - DNA, 20 bp, Coronavirus
catatgcactgtagtacagc

SEQ ID NO: 57181 - DNA, 20 bp, Coronavirus
aagatccttgtaaggtacaa

SEQ ID NO: 57182 - DNA, 20 bp, Coronavirus
taaggtacaacactaggggt

SEQ ID NO: 57183 - DNA, 20 bp, Coronavirus
cccctagtgttgtaccttac

SEQ ID NO: 57184 - DNA, 20 bp, Coronavirus
taccttacaaggatcttcaa

SEQ ID NO: 57185 - DNA, 20 bp, Coronavirus
gtggacccacagattcaact

SEQ ID NO: 57186 - DNA, 20 bp, Coronavirus
aactgacaataaccagaatg

SEQ ID NO: 57187 - DNA, 20 bp, Coronavirus
acccaataatactgcgtctt

SEQ ID NO: 57188 - DNA, 20 bp, Coronavirus
cccaataatactgcgtcttg

SEQ ID NO: 57189 - DNA, 20 bp, Coronavirus
ttgggtaaaccttggggtcg

SEQ ID NO: 57190 - DNA, 20 bp, Coronavirus
caactgagggagccttgaat

SEQ ID NO: 57191 - DNA, 20 bp, Coronavirus
aatacacccaaagaccacat

SEQ ID NO: 57192 - DNA, 20 bp, Coronavirus
gcacccgcaatcctaataac

SEQ ID NO: 57193 - DNA, 20 bp, Coronavirus
ctcaaggaacaacattgcca

SEQ ID NO: 57194 - DNA, 20 bp, Coronavirus
gcaatgttgttccttgagga

SEQ ID NO: 57195 - DNA, 20 bp, Coronavirus
tgtggcagtacgtttttggc

SEQ ID NO: 57196 - DNA, 20 bp, Coronavirus
gtggcagtacgtttttggcg

SEQ ID NO: 57197 - DNA, 20 bp, Coronavirus
tggcagtacgtttttggcga

SEQ ID NO: 57198 - DNA, 20 bp, Coronavirus
ttggcgaggctttttagatg

SEQ ID NO: 57199 - DNA, 20 bp, Coronavirus
tggcgaggctttttagatgc

SEQ ID NO: 57200 - DNA, 20 bp, Coronavirus
gatgacaaagatccacaatt

SEQ ID NO: 57201 - DNA, 20 bp, Coronavirus
aaagacaacgtcatactgct

SEQ ID NO: 57202 - DNA, 20 bp, Coronavirus
acgcatacaaaacattccca

SEQ ID NO: 57203 - DNA, 20 bp, Coronavirus
ccaccaacagagcctaaaaa

SEQ ID NO: 57204 - DNA, 20 bp, Coronavirus
ttaggctctgttggtgggaa

SEQ ID NO: 57205 - DNA, 20 bp, Coronavirus
tgcagaatgaattctcgtaa

SEQ ID NO: 57206 - DNA, 20 bp, Coronavirus
tcgtaactaaacagcacaag

SEQ ID NO: 57207 - DNA, 20 bp, Coronavirus
agttaactttaatctcacat

SEQ ID NO: 57208 - DNA, 20 bp, Coronavirus
gttaactttaatctcacata

SEQ ID NO: 57209 - DNA, 20 bp, Coronavirus
actttaatctcacatagcaa

SEQ ID NO: 57210 - DNA, 20 bp, Human rhinovirus 89
ttacggtaactttgtacgcc

SEQ ID NO: 57211 - DNA, 20 bp, Human rhinovirus 89
cggtaactttgtacgccagt

SEQ ID NO: 57212 - DNA, 20 bp, Human rhinovirus 89
gtacgccagtttttcccacc

SEQ ID NO: 57213 - DNA, 20 bp, Human rhinovirus 89
tacgccagtttttcccaccc

SEQ ID NO: 57214 - DNA, 20 bp, Human rhinovirus 89
ttcccacccttccccataat

SEQ ID NO: 57215 - DNA, 20 bp, Human rhinovirus 89
cccactggcgacagtggtcc

SEQ ID NO: 57216 - DNA, 20 bp, Human rhinovirus 89
ttgggtgagaagcctaatta

SEQ ID NO: 57217 - DNA, 20 bp, Human rhinovirus 89
ggtgagaagcctaattattg

SEQ ID NO: 57218 - DNA, 20 bp, Human rhinovirus 89
ttgacaaggtgtgaagagcc

SEQ ID NO: 57219 - DNA, 20 bp, Human rhinovirus 89
acaaggtgtgaagagccgcg

SEQ ID NO: 57220 - DNA, 20 bp, Human rhinovirus 89
ttcttttgattgcattttat

SEQ ID NO: 57221 - DNA, 20 bp, Human rhinovirus 89
tcttttgattgcattttatg

SEQ ID NO: 57222 - DNA, 20 bp, Human rhinovirus 89
cttttgattgcattttatgg

SEQ ID NO: 57223 - DNA, 20 bp, Human rhinovirus 89
ttttgattgcattttatggt

SEQ ID NO: 57224 - DNA, 20 bp, Human rhinovirus 89
tgattgcattttatggtgac

SEQ ID NO: 57225 - DNA, 20 bp, Human rhinovirus 89
caacacttcaatcaccaaca

SEQ ID NO: 57226 - DNA, 20 bp, Human rhinovirus 89
aatcaccaacagttgaagct

SEQ ID NO: 57227 - DNA, 20 bp, Human rhinovirus 89
aagcttgtggttattcagac

SEQ ID NO: 57228 - DNA, 20 bp, Human rhinovirus 89
tggttattcagacagactaa

SEQ ID NO: 57229 - DNA, 20 bp, Human rhinovirus 89
ttcagacagactaatacaga

SEQ ID NO: 57230 - DNA, 20 bp, Human rhinovirus 89
cctgatgcccttaaaaacat

SEQ ID NO: 57231 - DNA, 20 bp, Human rhinovirus 89
aaaacatgggtatatttggt

SEQ ID NO: 57232 - DNA, 20 bp, Human rhinovirus 89
ggtgaaaatatgttttacca

SEQ ID NO: 57233 - DNA, 20 bp, Human rhinovirus 89
gtgaaaatatgttttaccat

SEQ ID NO: 57234 - DNA, 20 bp, Human rhinovirus 89
taccattttctagggagatc

SEQ ID NO: 57235 - DNA, 20 bp, Human rhinovirus 89
gttaaattttgatggaacat

SEQ ID NO: 57236 - DNA, 20 bp, Human rhinovirus 89
aattttgatggaacattact

SEQ ID NO: 57237 - DNA, 20 bp, Human rhinovirus 89
tgatggaacattacttggta

SEQ ID NO: 57238 - DNA, 20 bp, Human rhinovirus 89
gatggaacattacttggtaa

SEQ ID NO: 57239 - DNA, 20 bp, Human rhinovirus 89
atggaacattacttggtaac

SEQ ID NO: 57240 - DNA, 20 bp, Human rhinovirus 89
tcagggccaagaagtaaggt

SEQ ID NO: 57241 - DNA, 20 bp, Human rhinovirus 89
cagggccaagaagtaaggtt

SEQ ID NO: 57242 - DNA, 20 bp, Human rhinovirus 89
agggccaagaagtaaggttg

SEQ ID NO: 57243 - DNA, 20 bp, Human rhinovirus 89
tgtttagtaccactcagggt

SEQ ID NO: 57244 - DNA, 20 bp, Human rhinovirus 89
agtaccactcagggtttacc

SEQ ID NO: 57245 - DNA, 20 bp, Human rhinovirus 89
atttagctaaagaagtcttt

SEQ ID NO: 57246 - DNA, 20 bp, Human rhinovirus 89
agctaaagaagtcttttcta

SEQ ID NO: 57247 - DNA, 20 bp, Human rhinovirus 89
gctaaagaagtcttttctat

SEQ ID NO: 57248 - DNA, 20 bp, Human rhinovirus 89
tctataccagtagatattgc

SEQ ID NO: 57249 - DNA, 20 bp, Human rhinovirus 89
ctataccagtagatattgcc

SEQ ID NO: 57250 - DNA, 20 bp, Human rhinovirus 89
gtacacatttagtgtgggat

SEQ ID NO: 57251 - DNA, 20 bp, Human rhinovirus 89
agtgtgggatgtggggttgc

SEQ ID NO: 57252 - DNA, 20 bp, Human rhinovirus 89
gtgtgggatgtggggttgca

SEQ ID NO: 57253 - DNA, 20 bp, Human rhinovirus 89
cagtccaccgcctcactagt

SEQ ID NO: 57254 - DNA, 20 bp, Human rhinovirus 89
taccatgggttagtgctagc

SEQ ID NO: 57255 - DNA, 20 bp, Human rhinovirus 89
aaaattatatagatagtgta

SEQ ID NO: 57256 - DNA, 20 bp, Human rhinovirus 89
tatagatagtgtattaaatg

SEQ ID NO: 57257 - DNA, 20 bp, Human rhinovirus 89
aatgaagttcttgtggtgcc

SEQ ID NO: 57258 - DNA, 20 bp, Human rhinovirus 89
ttgtggtgccaaatatccaa

SEQ ID NO: 57259 - DNA, 20 bp, Human rhinovirus 89
tggtgccaaatatccaacct

SEQ ID NO: 57260 - DNA, 20 bp, Human rhinovirus 89
cacatggcaatcaggaacaa

SEQ ID NO: 57261 - DNA, 20 bp, Human rhinovirus 89
tggcaagaaggacaaccata

SEQ ID NO: 57262 - DNA, 20 bp, Human rhinovirus 89
tccttcttgccagaacacag

SEQ ID NO: 57263 - DNA, 20 bp, Human rhinovirus 89
ttgccagaacacagatgcat

SEQ ID NO: 57264 - DNA, 20 bp, Human rhinovirus 89
ccagaacacagatgcatttg

SEQ ID NO: 57265 - DNA, 20 bp, Human rhinovirus 89
accacaaggccaaacatata

SEQ ID NO: 57266 - DNA, 20 bp, Human rhinovirus 89
ccacaaggccaaacatataa

SEQ ID NO: 57267 - DNA, 20 bp, Human rhinovirus 89
cctatcaacacacacactca

SEQ ID NO: 57268 - DNA, 20 bp, Human rhinovirus 89
gatggtatgtaattggttga

SEQ ID NO: 57269 - DNA, 20 bp, Human rhinovirus 89
gttgagtgtgtgtgttgata

SEQ ID NO: 57270 - DNA, 20 bp, Human rhinovirus 89
tgattgcactgaatgtacat

SEQ ID NO: 57271 - DNA, 20 bp, Human rhinovirus 89
cactgaatgtacatattact

SEQ ID NO: 57272 - DNA, 20 bp, Human rhinovirus 89
ctgccaccacaaagataggt

SEQ ID NO: 57273 - DNA, 20 bp, Human rhinovirus 89
gtggtggcagtaatatgtac

SEQ ID NO: 57274 - DNA, 20 bp, Human rhinovirus 89
tggtggcagtaatatgtaca

SEQ ID NO: 57275 - DNA, 20 bp, Human rhinovirus 89
cttttattgacctgagaaaa

SEQ ID NO: 57276 - DNA, 20 bp, Human rhinovirus 89
tattgacctgagaaaattcc

SEQ ID NO: 57277 - DNA, 20 bp, Human rhinovirus 89
attgacctgagaaaattcca

SEQ ID NO: 57278 - DNA, 20 bp, Human rhinovirus 89
ttgacctgagaaaattccag

SEQ ID NO: 57279 - DNA, 20 bp, Human rhinovirus 89
acctgagaaaattccagtgt

SEQ ID NO: 57280 - DNA, 20 bp, Human rhinovirus 89
taggttgttcaggctcacca

SEQ ID NO: 57281 - DNA, 20 bp, Human rhinovirus 89
ttcaggctcaccatggaggt

SEQ ID NO: 57282 - DNA, 20 bp, Human rhinovirus 89
aggctcaccatggaggtttc

SEQ ID NO: 57283 - DNA, 20 bp, Human rhinovirus 89
cttaaagagaaactctgtgc

SEQ ID NO: 57284 - DNA, 20 bp, Human rhinovirus 89
ttaaagagaaactctgtgcg

SEQ ID NO: 57285 - DNA, 20 bp, Human rhinovirus 89
tgttcttgctcgaatgctaa

SEQ ID NO: 57286 - DNA, 20 bp, Human rhinovirus 89
ttgctcgaatgctaactgtt

SEQ ID NO: 57287 - DNA, 20 bp, Human rhinovirus 89
ctcgaatgctaactgttgag

SEQ ID NO: 57288 - DNA, 20 bp, Human rhinovirus 89
agactgatatatattctttg

SEQ ID NO: 57289 - DNA, 20 bp, Human rhinovirus 89
tttgcccccagatcctaaat

SEQ ID NO: 57290 - DNA, 20 bp, Human rhinovirus 89
tacttgcaagcactaatcac

SEQ ID NO: 57291 - DNA, 20 bp, Human rhinovirus 89
caagcactaatcacactcta

SEQ ID NO: 57292 - DNA, 20 bp, Human rhinovirus 89
attaccagcaatggcaagaa

SEQ ID NO: 57293 - DNA, 20 bp, Human rhinovirus 89
ccagcaatggcaagaaggtt

SEQ ID NO: 57294 - DNA, 20 bp, Human rhinovirus 89
tactttgatctagacattca

SEQ ID NO: 57295 - DNA, 20 bp, Human rhinovirus 89
tctatataatttataaattg

SEQ ID NO: 57296 - DNA, 20 bp, Human rhinovirus 89
ataaattgttctgtacactt

SEQ ID NO: 57297 - DNA, 20 bp, Human rhinovirus 89
taaattgttctgtacacttc

SEQ ID NO: 57298 - DNA, 20 bp, Human rhinovirus 89
ttctgtacacttcagggtcc

SEQ ID NO: 57299 - DNA, 20 bp, Human rhinovirus 89
tgtacacttcagggtccata

SEQ ID NO: 57300 - DNA, 20 bp, Human rhinovirus 89
tgacccaggctctgagatct

SEQ ID NO: 57301 - DNA, 20 bp, Human rhinovirus 89
gtagatggagtaaaagttaa

SEQ ID NO: 57302 - DNA, 20 bp, Human rhinovirus 89
aggtctctgattcctatgat

SEQ ID NO: 57303 - DNA, 20 bp, Human rhinovirus 89
ctatgatttgcataaccatg

SEQ ID NO: 57304 - DNA, 20 bp, Human rhinovirus 89
gcataaccatgagggtgtta

SEQ ID NO: 57305 - DNA, 20 bp, Human rhinovirus 89
cccgacaaaagctggatatt

SEQ ID NO: 57306 - DNA, 20 bp, Human rhinovirus 89
tgggggtgttttgtacaagg

SEQ ID NO: 57307 - DNA, 20 bp, Human rhinovirus 89
tgtacaaggttggctctatt

SEQ ID NO: 57308 - DNA, 20 bp, Human rhinovirus 89
gtacaaggttggctctattc

SEQ ID NO: 57309 - DNA, 20 bp, Human rhinovirus 89
tacaaggttggctctattct

SEQ ID NO: 57310 - DNA, 20 bp, Human rhinovirus 89
gaaatcttttctctgctttc

SEQ ID NO: 57311 - DNA, 20 bp, Human rhinovirus 89
tctctgctttccacaaaaac

SEQ ID NO: 57312 - DNA, 20 bp, Human rhinovirus 89
ctctgctttccacaaaaacc

SEQ ID NO: 57313 - DNA, 20 bp, Human rhinovirus 89
tctgctttccacaaaaaccc

SEQ ID NO: 57314 - DNA, 20 bp, Human rhinovirus 89
ccacaaaaacccaggtatag

SEQ ID NO: 57315 - DNA, 20 bp, Human rhinovirus 89
tccaagaattgacctataaa

SEQ ID NO: 57316 - DNA, 20 bp, Human rhinovirus 89
ccaagaattgacctataaaa

SEQ ID NO: 57317 - DNA, 20 bp, Human rhinovirus 89
caagaattgacctataaaaa

SEQ ID NO: 57318 - DNA, 20 bp, Human rhinovirus 89
acctataaaaatgtaacttt

SEQ ID NO: 57319 - DNA, 20 bp, Human rhinovirus 89
tcttaaaagaggattcagag

SEQ ID NO: 57320 - DNA, 20 bp, Human papillomavirus type 131
taggattgacagcaattgtt

SEQ ID NO: 57321 - DNA, 20 bp, Human papillomavirus type 131
acagcaattgttctaattgt

SEQ ID NO: 57322 - DNA, 20 bp, Human papillomavirus type 131
ttctaattgtcacacaaata

SEQ ID NO: 57323 - DNA, 20 bp, Human papillomavirus type 131
taattgtcacacaaatatta

SEQ ID NO: 57324 - DNA, 20 bp, Human papillomavirus type 131
tcacacaaatattagactgt

SEQ ID NO: 57325 - DNA, 20 bp, Human papillomavirus type 131
taatgtacaggtagcttgtg

SEQ ID NO: 57326 - DNA, 20 bp, Human papillomavirus type 131
tgaagattctgtagactctc

SEQ ID NO: 57327 - DNA, 20 bp, Human papillomavirus type 131
tgtagactctctaaattcaa

SEQ ID NO: 57328 - DNA, 20 bp, Human papillomavirus type 131
aaatgtggcgggaaatgaaa

SEQ ID NO: 57329 - DNA, 20 bp, Human papillomavirus type 131
ccgccattttcatttcccgc

SEQ ID NO: 57330 - DNA, 20 bp, Human papillomavirus type 131
ttggtcatatttagatgtgc

SEQ ID NO: 57331 - DNA, 20 bp, Human papillomavirus type 131
gtcatatttagatgtgcata

SEQ ID NO: 57332 - DNA, 20 bp, Human papillomavirus type 131
agatgtgcatatgagaaatg

SEQ ID NO: 57333 - DNA, 20 bp, Human papillomavirus type 131
gatgtgcatatgagaaatgc

SEQ ID NO: 57334 - DNA, 20 bp, Human papillomavirus type 131
gatggtaatatggtatgttt

SEQ ID NO: 57335 - DNA, 20 bp, Human papillomavirus type 131
agttgagtctaattgagaaa

SEQ ID NO: 57336 - DNA, 20 bp, Human papillomavirus type 131
agtctaattgagaaagaatc

SEQ ID NO: 57337 - DNA, 20 bp, Human papillomavirus type 131
agaaagaatctacagacctt

SEQ ID NO: 57338 - DNA, 20 bp, Human papillomavirus type 131
gagatcacatcacatactgg

SEQ ID NO: 57339 - DNA, 20 bp, Human papillomavirus type 131
gaaaagaaaatgttattgta

SEQ ID NO: 57340 - DNA, 20 bp, Human papillomavirus type 131
agtttaaaaacaaaactatt

SEQ ID NO: 57341 - DNA, 20 bp, Human papillomavirus type 131
aaaaacaaaactattcttgc

SEQ ID NO: 57342 - DNA, 20 bp, Human papillomavirus type 131
aaaacaaaactattcttgct

SEQ ID NO: 57343 - DNA, 20 bp, Human papillomavirus type 131
ttgctcctgtcactagctcc

SEQ ID NO: 57344 - DNA, 20 bp, Human papillomavirus type 131
ctcctgtcactagctcctca

SEQ ID NO: 57345 - DNA, 20 bp, Human papillomavirus type 131
cggtggttggggcatgactg

SEQ ID NO: 57346 - DNA, 20 bp, Human papillomavirus type 131
ggtggttggggcatgactgt

SEQ ID NO: 57347 - DNA, 20 bp, Human papillomavirus type 131
gggcatgactgtgaaaaaac

SEQ ID NO: 57348 - DNA, 20 bp, Human papillomavirus type 131
aaagaccttacacaaagaca

SEQ ID NO: 57349 - DNA, 20 bp, Human papillomavirus type 131
aagaccttacacaaagacaa

SEQ ID NO: 57350 - DNA, 20 bp, Human papillomavirus type 131
ttattgagcctattggacct

SEQ ID NO: 57351 - DNA, 20 bp, Human papillomavirus type 131
ttgagcctattggacctaca

SEQ ID NO: 57352 - DNA, 20 bp, Human papillomavirus type 131
agcctattggacctacacct

SEQ ID NO: 57353 - DNA, 20 bp, Human papillomavirus type 131
gacctacacctataattcca

SEQ ID NO: 57354 - DNA, 20 bp, Human papillomavirus type 131
cagtagaacctggagcatct

SEQ ID NO: 57355 - DNA, 20 bp, Human papillomavirus type 131
gggcgggcctttaacagagc

SEQ ID NO: 57356 - DNA, 20 bp, Human papillomavirus type 131
ggcgggcctttaacagagct

SEQ ID NO: 57357 - DNA, 20 bp, Human papillomavirus type 131
aacagagctagagatcttta

SEQ ID NO: 57358 - DNA, 20 bp, Human papillomavirus type 131
acagagctagagatctttat

SEQ ID NO: 57359 - DNA, 20 bp, Human papillomavirus type 131
atagtagatttatagagcag

SEQ ID NO: 57360 - DNA, 20 bp, Human papillomavirus type 131
taaaggtatttgtccccgat

SEQ ID NO: 57361 - DNA, 20 bp, Human papillomavirus type 131
aaaggtatttgtccccgatg

SEQ ID NO: 57362 - DNA, 20 bp, Human papillomavirus type 131
aaggtatttgtccccgatgt

SEQ ID NO: 57363 - DNA, 20 bp, Human papillomavirus type 131
gtccccgatgtaggtgatgg

SEQ ID NO: 57364 - DNA, 20 bp, Human papillomavirus type 131
tccccgatgtaggtgatgga

SEQ ID NO: 57365 - DNA, 20 bp, Human papillomavirus type 131
gctttaatagaaaagaattt

SEQ ID NO: 57366 - DNA, 20 bp, Human papillomavirus type 131
ctttaatagaaaagaattta

SEQ ID NO: 57367 - DNA, 20 bp, Human papillomavirus type 131
aatagaaaagaatttataca

SEQ ID NO: 57368 - DNA, 20 bp, Human papillomavirus type 131
atagaaaagaatttatacaa

SEQ ID NO: 57369 - DNA, 20 bp, Human papillomavirus type 131
atacaattcagacagggaac

SEQ ID NO: 57370 - DNA, 20 bp, Human papillomavirus type 131
tttgaaatgacaaaggatac

SEQ ID NO: 57371 - DNA, 20 bp, Human papillomavirus type 131
ttgaaatgacaaaggataca

SEQ ID NO: 57372 - DNA, 20 bp, Human papillomavirus type 131
tgaaatgacaaaggatacat

SEQ ID NO: 57373 - DNA, 20 bp, Human papillomavirus type 131
gaaatgacaaaggatacata

SEQ ID NO: 57374 - DNA, 20 bp, Human papillomavirus type 131
aaatgacaaaggatacatat

SEQ ID NO: 57375 - DNA, 20 bp, Human papillomavirus type 131
tagcacatctgcaagttatg

SEQ ID NO: 57376 - DNA, 20 bp, Human papillomavirus type 131
agcacatctgcaagttatga

SEQ ID NO: 57377 - DNA, 20 bp, Human papillomavirus type 131
gcacatctgcaagttatgaa

SEQ ID NO: 57378 - DNA, 20 bp, Human papillomavirus type 131
tgaatcccagaatattggaa

SEQ ID NO: 57379 - DNA, 20 bp, Human papillomavirus type 131
gaagaatggcagttggcttt

SEQ ID NO: 57380 - DNA, 20 bp, Human papillomavirus type 131
gttgcatgtgtgttttatct

SEQ ID NO: 57381 - DNA, 20 bp, Human papillomavirus type 131
ttgcatgtgtgttttatctg

SEQ ID NO: 57382 - DNA, 20 bp, Human papillomavirus type 131
catgtgtgttttatctgact

SEQ ID NO: 57383 - DNA, 20 bp, Human papillomavirus type 131
tatctgactcatggggtcac

SEQ ID NO: 57384 - DNA, 20 bp, Human papillomavirus type 131
atctgactcatggggtcact

SEQ ID NO: 57385 - DNA, 20 bp, Human papillomavirus type 135
ccacaattccagatgtttgt

SEQ ID NO: 57386 - DNA, 20 bp, Human papillomavirus type 135
cagatgtttgtttggaagag

SEQ ID NO: 57387 - DNA, 20 bp, Human papillomavirus type 135
gtttggaagagttggtgtta

SEQ ID NO: 57388 - DNA, 20 bp, Human papillomavirus type 135
tttggaagagttggtgttac

SEQ ID NO: 57389 - DNA, 20 bp, Human papillomavirus type 135
ggaagagttggtgttacctt

SEQ ID NO: 57390 - DNA, 20 bp, Human papillomavirus type 135
aattacaaactgcagattgg

SEQ ID NO: 57391 - DNA, 20 bp, Human papillomavirus type 135
caaactgcagattggtttat

SEQ ID NO: 57392 - DNA, 20 bp, Human papillomavirus type 135
gtttattgtggaagaagcag

SEQ ID NO: 57393 - DNA, 20 bp, Human papillomavirus type 135
attgtggaagaagcagattg

SEQ ID NO: 57394 - DNA, 20 bp, Human papillomavirus type 135
ttgtggaagaagcagattgt

SEQ ID NO: 57395 - DNA, 20 bp, Human papillomavirus type 135
tagatttgagtccgagactg

SEQ ID NO: 57396 - DNA, 20 bp, Human papillomavirus type 135
gagtccgagactggcagcag

SEQ ID NO: 57397 - DNA, 20 bp, Human papillomavirus type 135
agtccgagactggcagcagt

SEQ ID NO: 57398 - DNA, 20 bp, Human papillomavirus type 135
ctcctcagagacaaagcaag

SEQ ID NO: 57399 - DNA, 20 bp, Human papillomavirus type 135
tcctcagagacaaagcaaga

SEQ ID NO: 57400 - DNA, 20 bp, Human papillomavirus type 135
accgaccgtttcgatgtact

SEQ ID NO: 57401 - DNA, 20 bp, Human papillomavirus type 135
cgatgtactgcaggatcaac

SEQ ID NO: 57402 - DNA, 20 bp, Human papillomavirus type 135
gatgtactgcaggatcaact

SEQ ID NO: 57403 - DNA, 20 bp, Human papillomavirus type 135
atgaaaaaggagcaactgac

SEQ ID NO: 57404 - DNA, 20 bp, Human papillomavirus type 135
tgaaaaaggagcaactgacc

SEQ ID NO: 57405 - DNA, 20 bp, Human papillomavirus type 135
aattcaaatcaactactatt

SEQ ID NO: 57406 - DNA, 20 bp, Human papillomavirus type 135
aaatcaactactatttcctc

SEQ ID NO: 57407 - DNA, 20 bp, Human papillomavirus type 135
cctctgtcgttactagttcc

SEQ ID NO: 57408 - DNA, 20 bp, Human papillomavirus type 135
ctctgtcgttactagttcca

SEQ ID NO: 57409 - DNA, 20 bp, Human papillomavirus type 135
ctagttccaagaagtccttc

SEQ ID NO: 57410 - DNA, 20 bp, Human papillomavirus type 135
gtcaggagttggtgcagtgg

SEQ ID NO: 57411 - DNA, 20 bp, Human papillomavirus type 135
gtgcagtgggccccctggtc

SEQ ID NO: 57412 - DNA, 20 bp, Human papillomavirus type 135
gctcttggttctctggtggt

SEQ ID NO: 57413 - DNA, 20 bp, Human papillomavirus type 135
gttctctggtggttgattct

SEQ ID NO: 57414 - DNA, 20 bp, Human papillomavirus type 135
tctggtggttgattctcctt

SEQ ID NO: 57415 - DNA, 20 bp, Human papillomavirus type 135
gtggcgctgaagtaatacct

SEQ ID NO: 57416 - DNA, 20 bp, Human papillomavirus type 135
ggatgtgataaatccagagg

SEQ ID NO: 57417 - DNA, 20 bp, Human papillomavirus type 135
gatgtgataaatccagaggc

SEQ ID NO: 57418 - DNA, 20 bp, Human papillomavirus type 135
tgcctttgcaagaaggtgct

SEQ ID NO: 57419 - DNA, 20 bp, Human papillomavirus type 135
gcaagaaggtgctatcccca

SEQ ID NO: 57420 - DNA, 20 bp, Human papillomavirus type 135
tacaatcgttttgtacaaca

SEQ ID NO: 57421 - DNA, 20 bp, Human papillomavirus type 135
tgtacaacaggttcaaacca

SEQ ID NO: 57422 - DNA, 20 bp, Human papillomavirus type 135
gtacaacaggttcaaaccag

SEQ ID NO: 57423 - DNA, 20 bp, Human papillomavirus type 135
tacaacaggttcaaaccaga

SEQ ID NO: 57424 - DNA, 20 bp, Human papillomavirus type 135
aaaccagaaacccagacttc

SEQ ID NO: 57425 - DNA, 20 bp, Human papillomavirus type 135
gaacatatccttcaagggga

SEQ ID NO: 57426 - DNA, 20 bp, Human papillomavirus type 135
aaggggatagccaactggac

SEQ ID NO: 57427 - DNA, 20 bp, Human papillomavirus type 135
ttcaaccagttttggtacaa

SEQ ID NO: 57428 - DNA, 20 bp, Human papillomavirus type 135
tcaaccagttttggtacaat

SEQ ID NO: 57429 - DNA, 20 bp, Human papillomavirus type 135
caaccagttttggtacaatt

SEQ ID NO: 57430 - DNA, 20 bp, Influenza B virus
cctacctgctttcactaata

SEQ ID NO: 57431 - DNA, 20 bp, Influenza B virus
cactaatagaagatggagaa

SEQ ID NO: 57432 - DNA, 20 bp, Influenza B virus
actaatagaagatggagaag

SEQ ID NO: 57433 - DNA, 20 bp, Influenza B virus
cactgttggttcggtgggaa

SEQ ID NO: 57434 - DNA, 20 bp, Influenza B virus
gttcggtgggaaagaatttg

SEQ ID NO: 57435 - DNA, 20 bp, Influenza B virus
tagctgagagaaaaatgaga

SEQ ID NO: 57436 - DNA, 20 bp, Influenza B virus
catgaagcatttgaaatagc

SEQ ID NO: 57437 - DNA, 20 bp, Influenza B virus
atgaagcatttgaaatagca

SEQ ID NO: 57438 - DNA, 20 bp, Influenza B virus
gaaatagcagaaggccacga

SEQ ID NO: 57439 - DNA, 20 bp, Influenza B virus
aaatagcagaaggccacgaa

SEQ ID NO: 57440 - DNA, 20 bp, Influenza B virus
cagctatgaacacagcaaag

SEQ ID NO: 57441 - DNA, 20 bp, Influenza B virus
agctatgaacacagcaaaga

SEQ ID NO: 57442 - DNA, 20 bp, Influenza B virus
tgctagtttttggacgtctt

SEQ ID NO: 57443 - DNA, 20 bp, Influenza B virus
ttggacgtcttctccctttc

SEQ ID NO: 57444 - DNA, 20 bp, Influenza B virus
tggacgtcttctccctttcc

SEQ ID NO: 57445 - DNA, 20 bp, Influenza A virus
tgaacagatggaaactggtg

SEQ ID NO: 57446 - DNA, 20 bp, Influenza A virus
ttccaacagatgctctgatc

SEQ ID NO: 57447 - DNA, 20 bp, Influenza A virus
caacagatgctctgatctca

SEQ ID NO: 57448 - DNA, 20 bp, Influenza A virus
tggcgttctccaccagtttc

SEQ ID NO: 57449 - DNA, 20 bp, Influenza A virus
tccaccagtttccatctgtt

SEQ ID NO: 57450 - DNA, 20 bp, Influenza A virus
tgtatgacaaagaggagatc

SEQ ID NO: 57451 - DNA, 20 bp, Influenza A virus
ggcgtcaagcgaacaatgga

SEQ ID NO: 57452 - DNA, 20 bp, Influenza A virus
gcgtcaagcgaacaatggag

SEQ ID NO: 57453 - DNA, 20 bp, Influenza A virus
catcttctccattgttcgct

SEQ ID NO: 57454 - DNA, 20 bp, Influenza A virus
tccattgttcgcttgacgcc

SEQ ID NO: 57455 - DNA, 20 bp, Influenza A virus
aagatctcatatttctggca

SEQ ID NO: 57456 - DNA, 20 bp, Influenza A virus
ctggcacggtctgcactcat

SEQ ID NO: 57457 - DNA, 20 bp, Influenza A virus
tggcacggtctgcactcatc

SEQ ID NO: 57458 - DNA, 20 bp, Influenza A virus
cctgcttgtgtgtacgggct

SEQ ID NO: 57459 - DNA, 20 bp, Influenza A virus
tgggccactgatcctctcag

SEQ ID NO: 57460 - DNA, 20 bp, Influenza A virus
tgcagcatttgaagatctga

SEQ ID NO: 57461 - DNA, 20 bp, Influenza A virus
gaagatctgagagtctcaag

SEQ ID NO: 57462 - DNA, 20 bp, Influenza A virus
aagatctgagagtctcaagc

SEQ ID NO: 57463 - DNA, 20 bp, Influenza A virus
atcagagggacaagagtggc

SEQ ID NO: 57464 - DNA, 20 bp, Influenza A virus
gaagcaatttgaactcctct

SEQ ID NO: 57465 - DNA, 20 bp, Streptococcus pyogenes
aaggtcgataagcatattgc

SEQ ID NO: 57466 - DNA, 20 bp, Streptococcus pyogenes
caactatttacttagatcaa

SEQ ID NO: 57467 - DNA, 20 bp, Streptococcus pyogenes
acttagatcaaatgaaagag

SEQ ID NO: 57468 - DNA, 20 bp, Streptococcus pyogenes
cttagatcaaatgaaagagc

SEQ ID NO: 57469 - DNA, 20 bp, Streptococcus pyogenes
gatcaaatgaaagagctctt

SEQ ID NO: 57470 - DNA, 20 bp, Streptococcus pyogenes
gtttatttggggtggccctg

SEQ ID NO: 57471 - DNA, 20 bp, Streptococcus pyogenes
tttatttggggtggccctgg

SEQ ID NO: 57472 - DNA, 20 bp, Streptococcus pyogenes
atttggggtggccctgggct

SEQ ID NO: 57473 - DNA, 20 bp, Streptococcus pyogenes
tttggggtggccctgggctt

SEQ ID NO: 57474 - DNA, 20 bp, Streptococcus pyogenes
ggggtggccctgggcttgga

SEQ ID NO: 57475 - DNA, 20 bp, Streptococcus pyogenes
acattgctgccgaagctatt

SEQ ID NO: 57476 - DNA, 20 bp, Streptococcus pyogenes
ctgccgaagctattcgcgcc

SEQ ID NO: 57477 - DNA, 20 bp, Streptococcus pyogenes
gcgccagaaagcaagatgga

SEQ ID NO: 57478 - DNA, 20 bp, Streptococcus pyogenes
ttcccatcgaagaaattcaa

SEQ ID NO: 57479 - DNA, 20 bp, Streptococcus pyogenes
ccatcgaagaaattcaagcg

SEQ ID NO: 57480 - DNA, 20 bp, Streptococcus pyogenes
ttcagaagtgaacacatttc

SEQ ID NO: 57481 - DNA, 20 bp, Streptococcus pyogenes
agaagtgaacacatttcttt

SEQ ID NO: 57482 - DNA, 20 bp, Streptococcus pyogenes
ctttttatacacgcctctta

SEQ ID NO: 57483 - DNA, 20 bp, Streptococcus pyogenes
tttttatacacgcctcttag

SEQ ID NO: 57484 - DNA, 20 bp, Streptococcus pyogenes
ttatacacgcctcttagaag

SEQ ID NO: 57485 - DNA, 20 bp, Streptococcus pyogenes
tgtaattaaagaaactggta

SEQ ID NO: 57486 - DNA, 20 bp, Streptococcus pyogenes
aagaaactggtaaaaaggct

SEQ ID NO: 57487 - DNA, 20 bp, Streptococcus pyogenes
aaattcagtgtactaactgt

SEQ ID NO: 57488 - DNA, 20 bp, Streptococcus pyogenes
agtgtactaactgtcagcat

SEQ ID NO: 57489 - DNA, 20 bp, Streptococcus pyogenes
tgatgagtcgttatgatttt

SEQ ID NO: 57490 - DNA, 20 bp, Streptococcus pyogenes
caaaagcaggagcagaagct

SEQ ID NO: 57491 - DNA, 20 bp, Streptococcus pyogenes
tccttttgcgactattgatc

SEQ ID NO: 57492 - DNA, 20 bp, Streptococcus pyogenes
tgcgactattgatcccaatg

SEQ ID NO: 57493 - DNA, 20 bp, Streptococcus pyogenes
gcgactattgatcccaatgt

SEQ ID NO: 57494 - DNA, 20 bp, Streptococcus pyogenes
cgactattgatcccaatgtt

SEQ ID NO: 57495 - DNA, 20 bp, Streptococcus pyogenes
aaaaaatggcacgaactcaa

SEQ ID NO: 57496 - DNA, 20 bp, Streptococcus pyogenes
aatgttttgcaaaagattaa

SEQ ID NO: 57497 - DNA, 20 bp, Streptococcus pyogenes
atgttttgcaaaagattaaa

SEQ ID NO: 57498 - DNA, 20 bp, Streptococcus pyogenes
tgcaaaagattaaacctgtt

SEQ ID NO: 57499 - DNA, 20 bp, Streptococcus pyogenes
gcaaaagattaaacctgttt

SEQ ID NO: 57500 - DNA, 20 bp, Streptococcus pyogenes
acgatgaggataaagaagaa

SEQ ID NO: 57501 - DNA, 20 bp, Streptococcus pyogenes
ttggaagctatcggtcttac

SEQ ID NO: 57502 - DNA, 20 bp, Streptococcus pyogenes
tggaagctatcggtcttact

SEQ ID NO: 57503 - DNA, 20 bp, Streptococcus pyogenes
ggaagctatcggtcttactg

SEQ ID NO: 57504 - DNA, 20 bp, Streptococcus pyogenes
gaagctatcggtcttactga

SEQ ID NO: 57505 - DNA, 20 bp, Streptococcus pyogenes
gttttatggctattgacaat

SEQ ID NO: 57506 - DNA, 20 bp, Streptococcus pyogenes
tatggctattgacaatattg

SEQ ID NO: 57507 - DNA, 20 bp, Streptococcus pyogenes
atggctattgacaatattgt

SEQ ID NO: 57508 - DNA, 20 bp, Streptococcus pyogenes
tggctattgacaatattgtc

SEQ ID NO: 57509 - DNA, 20 bp, Streptococcus pyogenes
acaatattgtcaagaacctt

SEQ ID NO: 57510 - DNA, 20 bp, Streptococcus pyogenes
agtcaatcattgcccacatt

SEQ ID NO: 57511 - DNA, 20 bp, Streptococcus pyogenes
cccacattggaactcaggaa

SEQ ID NO: 57512 - DNA, 20 bp, Streptococcus pyogenes
gaactcaggaatttaaccga

SEQ ID NO: 57513 - DNA, 20 bp, Streptococcus pyogenes
aaccgaatcaaagttggtat

SEQ ID NO: 57514 - DNA, 20 bp, Streptococcus pyogenes
accgaatcaaagttggtatt

SEQ ID NO: 57515 - DNA, 20 bp, Streptococcus pyogenes
ttttaactttttatttttag

SEQ ID NO: 57516 - DNA, 20 bp, Streptococcus pyogenes
taactttttatttttaggct

SEQ ID NO: 57517 - DNA, 20 bp, Streptococcus pyogenes
aactttttatttttaggctt

SEQ ID NO: 57518 - DNA, 20 bp, Streptococcus pyogenes
actttttatttttaggctta

SEQ ID NO: 57519 - DNA, 20 bp, Streptococcus pyogenes
ttatttttaggcttaggctt

SEQ ID NO: 57520 - DNA, 20 bp, Streptococcus pyogenes
aagctccctatatcgtccct

SEQ ID NO: 57521 - DNA, 20 bp, Streptococcus pyogenes
gtaatgacttaggtaagatt

SEQ ID NO: 57522 - DNA, 20 bp, Streptococcus pyogenes
ggtaagattttgcaggctta

SEQ ID NO: 57523 - DNA, 20 bp, Streptococcus pyogenes
tgcaggcttatcaattagga

SEQ ID NO: 57524 - DNA, 20 bp, Streptococcus pyogenes
gcaggcttatcaattaggag

SEQ ID NO: 57525 - DNA, 20 bp, Streptococcus pyogenes
atgaaataatctaagatggt

SEQ ID NO: 57526 - DNA, 20 bp, Streptococcus pyogenes
atataatgttttaaatggct

SEQ ID NO: 57527 - DNA, 20 bp, Streptococcus pyogenes
taaatggcttgttttgttgt

SEQ ID NO: 57528 - DNA, 20 bp, Streptococcus pyogenes
aaatggcttgttttgttgtg

SEQ ID NO: 57529 - DNA, 20 bp, Streptococcus pyogenes
aatggcttgttttgttgtgc

SEQ ID NO: 57530 - DNA, 20 bp, Streptococcus pyogenes
gatagagatgttaggattac

SEQ ID NO: 57531 - DNA, 20 bp, Streptococcus pyogenes
atagagatgttaggattact

SEQ ID NO: 57532 - DNA, 20 bp, Streptococcus pyogenes
ggattactatcaaacgtctc

SEQ ID NO: 57533 - DNA, 20 bp, Streptococcus pyogenes
ctatcaaacgtctcttgaaa

SEQ ID NO: 57534 - DNA, 20 bp, Streptococcus pyogenes
aaaggttttgtgactcatat

SEQ ID NO: 57535 - DNA, 20 bp, Streptococcus pyogenes
gtattttttggattcactcc

SEQ ID NO: 57536 - DNA, 20 bp, Streptococcus pyogenes
tattttttggattcactccg

SEQ ID NO: 57537 - DNA, 20 bp, Streptococcus pyogenes
tttggattcactccgcaaat

SEQ ID NO: 57538 - DNA, 20 bp, Streptococcus pyogenes
ttggattcactccgcaaatc

SEQ ID NO: 57539 - DNA, 20 bp, Streptococcus pyogenes
tggattcactccgcaaatca

SEQ ID NO: 57540 - DNA, 20 bp, Streptococcus pyogenes
tcgtaccccgataggaaatt

SEQ ID NO: 57541 - DNA, 20 bp, Streptococcus pyogenes
tggaggagtctttaaatctt

SEQ ID NO: 57542 - DNA, 20 bp, Streptococcus pyogenes
ggaggagtctttaaatcttt

SEQ ID NO: 57543 - DNA, 20 bp, Streptococcus pyogenes
gaggagtctttaaatcttta

SEQ ID NO: 57544 - DNA, 20 bp, Streptococcus pyogenes
aaatctttatcagccgtaga

SEQ ID NO: 57545 - DNA, 20 bp, Streptococcus pyogenes
cgttttacaaggccaacgtt

SEQ ID NO: 57546 - DNA, 20 bp, Streptococcus pyogenes
tacaaggccaacgttgggga

SEQ ID NO: 57547 - DNA, 20 bp, Streptococcus pyogenes
acaaggccaacgttggggat

SEQ ID NO: 57548 - DNA, 20 bp, Streptococcus pyogenes
caaggccaacgttggggatc

SEQ ID NO: 57549 - DNA, 20 bp, Streptococcus pyogenes
gggatctcgtatgggagata

SEQ ID NO: 57550 - DNA, 20 bp, Streptococcus pyogenes
gaacgacagtggataagtta

SEQ ID NO: 57551 - DNA, 20 bp, Streptococcus pyogenes
gcaaagttacgccctgcttt

SEQ ID NO: 57552 - DNA, 20 bp, Streptococcus pyogenes
cgccctgcttttatcaaaga

SEQ ID NO: 57553 - DNA, 20 bp, Streptococcus pyogenes
tatcaaagatgaggggacag

SEQ ID NO: 57554 - DNA, 20 bp, Streptococcus pyogenes
atcaaagatgaggggacagt

SEQ ID NO: 57555 - DNA, 20 bp, Streptococcus pyogenes
agcggtttcacgagaccttg

SEQ ID NO: 57556 - DNA, 20 bp, Streptococcus pyogenes
gcggtttcacgagaccttgg

SEQ ID NO: 57557 - DNA, 20 bp, Streptococcus pyogenes
cacgagaccttggttttgac

SEQ ID NO: 57558 - DNA, 20 bp, Streptococcus pyogenes
acgagaccttggttttgaca

SEQ ID NO: 57559 - DNA, 20 bp, Streptococcus pyogenes
gttttgacaatgaaaaagtt

SEQ ID NO: 57560 - DNA, 20 bp, Streptococcus pyogenes
tatggctaatggaacaccag

SEQ ID NO: 57561 - DNA, 20 bp, Streptococcus pyogenes
atggctaatggaacaccaga

SEQ ID NO: 57562 - DNA, 20 bp, Streptococcus pyogenes
tggctaatggaacaccagaa

SEQ ID NO: 57563 - DNA, 20 bp, Streptococcus pyogenes
attgatgcactggttgacaa

SEQ ID NO: 57564 - DNA, 20 bp, Streptococcus pyogenes
atgcactggttgacaaaggc

SEQ ID NO: 57565 - DNA, 20 bp, Streptococcus pyogenes
gcatcaacgacaatagaaga

SEQ ID NO: 57566 - DNA, 20 bp, Streptococcus pyogenes
catcaacgacaatagaagat

SEQ ID NO: 57567 - DNA, 20 bp, Streptococcus pyogenes
tggtcgattaacctcactaa

SEQ ID NO: 57568 - DNA, 20 bp, Streptococcus pyogenes
ggtcgattaacctcactaac

SEQ ID NO: 57569 - DNA, 20 bp, Streptococcus pyogenes
gtcgattaacctcactaact

SEQ ID NO: 57570 - DNA, 20 bp, Streptococcus pyogenes
tccaataagatgtttatctt

SEQ ID NO: 57571 - DNA, 20 bp, Streptococcus pyogenes
atcttgaagggttgctctac

SEQ ID NO: 57572 - DNA, 20 bp, Streptococcus pyogenes
tcttgaagggttgctctacc

SEQ ID NO: 57573 - DNA, 20 bp, Streptococcus pyogenes
aagggttgctctacctaaga

SEQ ID NO: 57574 - DNA, 20 bp, Streptococcus pyogenes
ctctacctaagacttgtccc

SEQ ID NO: 57575 - DNA, 20 bp, Streptococcus pyogenes
gattttcgacactagtagct

SEQ ID NO: 57576 - DNA, 20 bp, Streptococcus pyogenes
attttcgacactagtagcta

SEQ ID NO: 57577 - DNA, 20 bp, Streptococcus pyogenes
tcgacactagtagctacaaa

SEQ ID NO: 57578 - DNA, 20 bp, Streptococcus pyogenes
cgacactagtagctacaaaa

SEQ ID NO: 57579 - DNA, 20 bp, Streptococcus pyogenes
gacactagtagctacaaaag

SEQ ID NO: 57580 - DNA, 20 bp, Streptococcus pyogenes
aattgacgacctttgcatcg

SEQ ID NO: 57581 - DNA, 20 bp, Streptococcus pyogenes
acgacctttgcatcggaaat

SEQ ID NO: 57582 - DNA, 20 bp, Streptococcus pyogenes
gcatcggaaatgccccattg

SEQ ID NO: 57583 - DNA, 20 bp, Streptococcus pyogenes
catcggaaatgccccattgt

SEQ ID NO: 57584 - DNA, 20 bp, Streptococcus pyogenes
tcttaattgttttttcattt

SEQ ID NO: 57585 - DNA, 20 bp, Streptococcus pyogenes
tttagcatctttttcgtata

SEQ ID NO: 57586 - DNA, 20 bp, Streptococcus pyogenes
agcatctttttcgtataaaa

SEQ ID NO: 57587 - DNA, 20 bp, Streptococcus pyogenes
gcatctttttcgtataaaac

SEQ ID NO: 57588 - DNA, 20 bp, Streptococcus pyogenes
ttcgtataaaactttgccac

SEQ ID NO: 57589 - DNA, 20 bp, Streptococcus pyogenes
tcgtataaaactttgccact

SEQ ID NO: 57590 - DNA, 20 bp, Streptococcus pyogenes
cgatcttgtcagtatccgct

SEQ ID NO: 57591 - DNA, 20 bp, Streptococcus pyogenes
tcagtatccgctttggcagc

SEQ ID NO: 57592 - DNA, 20 bp, Streptococcus pyogenes
ggcagcttgtggtaataaaa

SEQ ID NO: 57593 - DNA, 20 bp, Streptococcus pyogenes
gcagcttgtggtaataaaaa

SEQ ID NO: 57594 - DNA, 20 bp, Streptococcus pyogenes
tggtaataaaaatgcttcag

SEQ ID NO: 57595 - DNA, 20 bp, Streptococcus pyogenes
tgtgactggtttgaagcacg

SEQ ID NO: 57596 - DNA, 20 bp, Streptococcus pyogenes
gtgactggtttgaagcacgc

SEQ ID NO: 57597 - DNA, 20 bp, Streptococcus pyogenes
tgactggtttgaagcacgcg

SEQ ID NO: 57598 - DNA, 20 bp, Streptococcus pyogenes
gaagcacgcggttgacgata

SEQ ID NO: 57599 - DNA, 20 bp, Streptococcus pyogenes
aagcacgcggttgacgataa

SEQ ID NO: 57600 - DNA, 20 bp, Streptococcus pyogenes
acctcaaaatcatctatgga

SEQ ID NO: 57601 - DNA, 20 bp, Streptococcus pyogenes
cataaaaatgaaaactactg

SEQ ID NO: 57602 - DNA, 20 bp, Streptococcus pyogenes
ggatagaatctgttaaattg

SEQ ID NO: 57603 - DNA, 20 bp, Streptococcus pyogenes
aattgacttactcagatggt

SEQ ID NO: 57604 - DNA, 20 bp, Streptococcus pyogenes
acttactcagatggttcaga

SEQ ID NO: 57605 - DNA, 20 bp, Streptococcus pyogenes
acaacaaggattttcgtcaa

SEQ ID NO: 57606 - DNA, 20 bp, Streptococcus pyogenes
tcgtcaagctattcagtttg

SEQ ID NO: 57607 - DNA, 20 bp, Streptococcus pyogenes
cgtcaagctattcagtttgc

SEQ ID NO: 57608 - DNA, 20 bp, Streptococcus pyogenes
gtcaagctattcagtttgct

SEQ ID NO: 57609 - DNA, 20 bp, Streptococcus pyogenes
agtttgcttttgaccgagcg

SEQ ID NO: 57610 - DNA, 20 bp, Streptococcus pyogenes
aacagctgaaggtgtaacct

SEQ ID NO: 57611 - DNA, 20 bp, Streptococcus pyogenes
acagctgaaggtgtaacctt

SEQ ID NO: 57612 - DNA, 20 bp, Streptococcus pyogenes
ccagttcaattagattaccc

SEQ ID NO: 57613 - DNA, 20 bp, Streptococcus pyogenes
aattagattaccctgttgac

SEQ ID NO: 57614 - DNA, 20 bp, Streptococcus pyogenes
gattaccctgttgaccaagc

SEQ ID NO: 57615 - DNA, 20 bp, Streptococcus pyogenes
gtcatgagaaaatcatttta

SEQ ID NO: 57616 - DNA, 20 bp, Streptococcus pyogenes
tacagctggctgatgacaca

SEQ ID NO: 57617 - DNA, 20 bp, Streptococcus pyogenes
acagctggctgatgacacaa

SEQ ID NO: 57618 - DNA, 20 bp, Streptococcus pyogenes
cagctggctgatgacacaac

SEQ ID NO: 57619 - DNA, 20 bp, Streptococcus pyogenes
atttgatttagggttacgtt

SEQ ID NO: 57620 - DNA, 20 bp, Streptococcus pyogenes
gtcgttagtacctttggcga

SEQ ID NO: 57621 - DNA, 20 bp, Streptococcus pyogenes
tcgttagtacctttggcgac

SEQ ID NO: 57622 - DNA, 20 bp, Streptococcus pyogenes
gtacctttggcgacagcgca

SEQ ID NO: 57623 - DNA, 20 bp, Streptococcus pyogenes
ggcgacagcgcaggcacaag

SEQ ID NO: 57624 - DNA, 20 bp, Streptococcus pyogenes
gcgacagcgcaggcacaaga

SEQ ID NO: 57625 - DNA, 20 bp, Streptococcus pyogenes
gtcatgtacctagcagtgag

SEQ ID NO: 57626 - DNA, 20 bp, Streptococcus pyogenes
ccccaagcatctgccacctc

SEQ ID NO: 57627 - DNA, 20 bp, Streptococcus pyogenes
ctatggcaccacctgcgaca

SEQ ID NO: 57628 - DNA, 20 bp, Streptococcus pyogenes
agaggtggcagatgcttggg

SEQ ID NO: 57629 - DNA, 20 bp, Streptococcus pyogenes
gggtaatggctcactgctag

SEQ ID NO: 57630 - DNA, 20 bp, Streptococcus pyogenes
cttacgctccaaaccatgcc

SEQ ID NO: 57631 - DNA, 20 bp, Streptococcus pyogenes
ttacgctccaaaccatgcct

SEQ ID NO: 57632 - DNA, 20 bp, Streptococcus pyogenes
cgctccaaaccatgcctaca

SEQ ID NO: 57633 - DNA, 20 bp, Streptococcus pyogenes
aaccacaaacagcagccttc

SEQ ID NO: 57634 - DNA, 20 bp, Streptococcus pyogenes
aaagaagaagtggcttctgc

SEQ ID NO: 57635 - DNA, 20 bp, Streptococcus pyogenes
cagaaaaccattatgatcat

SEQ ID NO: 57636 - DNA, 20 bp, Streptococcus pyogenes
tgatcatgttcatgtctcct

SEQ ID NO: 57637 - DNA, 20 bp, Streptococcus pyogenes
atgtctcctttaatgcttaa

SEQ ID NO: 57638 - DNA, 20 bp, Streptococcus pyogenes
aatgcttaattcatgctatt

SEQ ID NO: 57639 - DNA, 20 bp, Streptococcus pyogenes
atgcttaattcatgctatta

SEQ ID NO: 57640 - DNA, 20 bp, Streptococcus pyogenes
cgaagcttttgcaacacctc

SEQ ID NO: 57641 - DNA, 20 bp, Streptococcus pyogenes
tgcaacacctcgaaaacctg

SEQ ID NO: 57642 - DNA, 20 bp, Streptococcus pyogenes
gcaacacctcgaaaacctga

SEQ ID NO: 57643 - DNA, 20 bp, Streptococcus pyogenes
caacacctcgaaaacctgaa

SEQ ID NO: 57644 - DNA, 20 bp, Streptococcus pyogenes
tattgttggtactggtttag

SEQ ID NO: 57645 - DNA, 20 bp, Streptococcus pyogenes
ccggtgcgtcttatttagat

SEQ ID NO: 57646 - DNA, 20 bp, Streptococcus pyogenes
tttagatgaattttattggt

SEQ ID NO: 57647 - DNA, 20 bp, Streptococcus pyogenes
agatgaattttattggttgg

SEQ ID NO: 57648 - DNA, 20 bp, Streptococcus pyogenes
gatgaattttattggttgga

SEQ ID NO: 57649 - DNA, 20 bp, Streptococcus pyogenes
tattggttggataaggatga

SEQ ID NO: 57650 - DNA, 20 bp, Streptococcus pyogenes
gccagatttcacctccctca

SEQ ID NO: 57651 - DNA, 20 bp, Streptococcus pyogenes
ccagatttcacctccctcaa

SEQ ID NO: 57652 - DNA, 20 bp, Streptococcus pyogenes
cacctccctcaagttcaaca

SEQ ID NO: 57653 - DNA, 20 bp, Streptococcus pyogenes
acctccctcaagttcaacaa

SEQ ID NO: 57654 - DNA, 20 bp, Streptococcus pyogenes
aacaaatataaccaatatga

SEQ ID NO: 57655 - DNA, 20 bp, Streptococcus pyogenes
ggtggttcttggaatttatg

SEQ ID NO: 57656 - DNA, 20 bp, Streptococcus pyogenes
ttggaatttatgggaaaatc

SEQ ID NO: 57657 - DNA, 20 bp, Streptococcus pyogenes
gaatttatgggaaaatctag

SEQ ID NO: 57658 - DNA, 20 bp, Streptococcus pyogenes
atgggaaaatctagctgctc

SEQ ID NO: 57659 - DNA, 20 bp, Streptococcus pyogenes
tgggaaaatctagctgctca

SEQ ID NO: 57660 - DNA, 20 bp, Streptococcus pyogenes
acggtctttattccaatagt

SEQ ID NO: 57661 - DNA, 20 bp, Streptococcus pyogenes
cggtctttattccaatagtg

SEQ ID NO: 57662 - DNA, 20 bp, Streptococcus pyogenes
attccaatagtgagggcaat

SEQ ID NO: 57663 - DNA, 20 bp, Streptococcus pyogenes
ttccaatagtgagggcaatt

SEQ ID NO: 57664 - DNA, 20 bp, Streptococcus pyogenes
caatagtgagggcaattacg

SEQ ID NO: 57665 - DNA, 20 bp, Streptococcus pyogenes
tgatcaatttatcattgcta

SEQ ID NO: 57666 - DNA, 20 bp, Streptococcus pyogenes
gatcaatttatcattgctaa

SEQ ID NO: 57667 - DNA, 20 bp, Streptococcus pyogenes
atcaatttatcattgctaaa

SEQ ID NO: 57668 - DNA, 20 bp, Streptococcus pyogenes
atcattgctaaaacaccagc

SEQ ID NO: 57669 - DNA, 20 bp, Streptococcus pyogenes
tcattgctaaaacaccagca

SEQ ID NO: 57670 - DNA, 20 bp, Streptococcus pyogenes
aactatggtatgtatggcac

SEQ ID NO: 57671 - DNA, 20 bp, Streptococcus pyogenes
actatggtatgtatggcaca

SEQ ID NO: 57672 - DNA, 20 bp, Streptococcus pyogenes
acctatgttcaaaatggact

SEQ ID NO: 57673 - DNA, 20 bp, Streptococcus pyogenes
aaaatggactcttagcttct

SEQ ID NO: 57674 - DNA, 20 bp, Streptococcus pyogenes
gcttctattttattgaccac

SEQ ID NO: 57675 - DNA, 20 bp, Streptococcus pyogenes
atatttgaacgcctctttgc

SEQ ID NO: 57676 - DNA, 20 bp, Streptococcus pyogenes
gaacgcctctttgcagaacc

SEQ ID NO: 57677 - DNA, 20 bp, Streptococcus pyogenes
aacgcctctttgcagaacca

SEQ ID NO: 57678 - DNA, 20 bp, Streptococcus pyogenes
gcagaaccaatgggtggtgg

SEQ ID NO: 57679 - DNA, 20 bp, Streptococcus pyogenes
cagaaccaatgggtggtggt

SEQ ID NO: 57680 - DNA, 20 bp, Streptococcus pyogenes
gtgaaccgctgattcgcgtt

SEQ ID NO: 57681 - DNA, 20 bp, Streptococcus pyogenes
gcgttagccccaatcagttt

SEQ ID NO: 57682 - DNA, 20 bp, Streptococcus pyogenes
gccccaatcagtttcagcct

SEQ ID NO: 57683 - DNA, 20 bp, Streptococcus pyogenes
cagcctttgaccaatgcctg

SEQ ID NO: 57684 - DNA, 20 bp, Streptococcus pyogenes
agcctttgaccaatgcctgc

SEQ ID NO: 57685 - DNA, 20 bp, Streptococcus pyogenes
ggccttagataaggatagtc

SEQ ID NO: 57686 - DNA, 20 bp, Streptococcus pyogenes
gataaggatagtcttgattt

SEQ ID NO: 57687 - DNA, 20 bp, Streptococcus pyogenes
atttagctgccatttttgaa

SEQ ID NO: 57688 - DNA, 20 bp, Streptococcus pyogenes
agctgccatttttgaaggca

SEQ ID NO: 57689 - DNA, 20 bp, Streptococcus pyogenes
gctgccatttttgaaggcat

SEQ ID NO: 57690 - DNA, 20 bp, Streptococcus pyogenes
atcagcgctatcagttacaa

SEQ ID NO: 57691 - DNA, 20 bp, Streptococcus pyogenes
tcagcgctatcagttacaag

SEQ ID NO: 57692 - DNA, 20 bp, Streptococcus pyogenes
caagctatttaccatacgga

SEQ ID NO: 57693 - DNA, 20 bp, Streptococcus pyogenes
accatacggagcgttcaaat

SEQ ID NO: 57694 - DNA, 20 bp, Streptococcus pyogenes
ccatacggagcgttcaaatg

SEQ ID NO: 57695 - DNA, 20 bp, Streptococcus pyogenes
accaaacttaaggctaatcg

SEQ ID NO: 57696 - DNA, 20 bp, Streptococcus pyogenes
aggctaatcggcttgtccta

SEQ ID NO: 57697 - DNA, 20 bp, Streptococcus pyogenes
tcctagttgtacgaggagag

SEQ ID NO: 57698 - DNA, 20 bp, Streptococcus pyogenes
tacgaggagagtctagtgag

SEQ ID NO: 57699 - DNA, 20 bp, Streptococcus pyogenes
ctcactagactctcctcgta

SEQ ID NO: 57700 - DNA, 20 bp, Streptococcus pyogenes
gatttgtcatcgttatagca

SEQ ID NO: 57701 - DNA, 20 bp, Streptococcus pyogenes
atttgtcatcgttatagcat

SEQ ID NO: 57702 - DNA, 20 bp, Streptococcus pyogenes
gtcatcgttatagcatacct

SEQ ID NO: 57703 - DNA, 20 bp, Streptococcus pyogenes
tcatcgttatagcatacctt

SEQ ID NO: 57704 - DNA, 20 bp, Streptococcus pyogenes
tagcataccttatttaccag

SEQ ID NO: 57705 - DNA, 20 bp, Streptococcus pyogenes
aggcaattacaactgactat

SEQ ID NO: 57706 - DNA, 20 bp, Streptococcus pyogenes
caactgactatgacgcttac

SEQ ID NO: 57707 - DNA, 20 bp, Streptococcus pyogenes
caaacaagcgcataagcctc

SEQ ID NO: 57708 - DNA, 20 bp, Streptococcus pyogenes
tcaaaaactgttgattacag

SEQ ID NO: 57709 - DNA, 20 bp, Streptococcus pyogenes
attacagaagtgaactcttg

SEQ ID NO: 57710 - DNA, 20 bp, Streptococcus pyogenes
atcagagtcaagctgatcac

SEQ ID NO: 57711 - DNA, 20 bp, Streptococcus pyogenes
aggacaactgtgtgtaaaaa

SEQ ID NO: 57712 - DNA, 20 bp, Streptococcus pyogenes
ggacaactgtgtgtaaaaat

SEQ ID NO: 57713 - DNA, 20 bp, Streptococcus pyogenes
ttttggatcgtgaagtaacg

SEQ ID NO: 57714 - DNA, 20 bp, Streptococcus pyogenes
tggatcgtgaagtaacgcaa

SEQ ID NO: 57715 - DNA, 20 bp, Streptococcus pyogenes
tgaatttaaagctttagtta

SEQ ID NO: 57716 - DNA, 20 bp, Streptococcus pyogenes
gaatttaaagctttagttaa

SEQ ID NO: 57717 - DNA, 20 bp, Streptococcus pyogenes
aatttaaagctttagttaat

SEQ ID NO: 57718 - DNA, 20 bp, Streptococcus pyogenes
aaagctttagttaatggaaa

SEQ ID NO: 57719 - DNA, 20 bp, Streptococcus pyogenes
aagctttagttaatggaaaa

SEQ ID NO: 57720 - DNA, 20 bp, Streptococcus pyogenes
agttaaaatacaattaccaa

SEQ ID NO: 57721 - DNA, 20 bp, Streptococcus pyogenes
gttaaaatacaattaccaaa

SEQ ID NO: 57722 - DNA, 20 bp, Streptococcus pyogenes
aaatacaattaccaaaggcc

SEQ ID NO: 57723 - DNA, 20 bp, Streptococcus pyogenes
ccaaaggccaatctgatttc

SEQ ID NO: 57724 - DNA, 20 bp, Streptococcus pyogenes
ctttgactgctatgggagaa

SEQ ID NO: 57725 - DNA, 20 bp, Streptococcus pyogenes
gtcgcttcaaacgttctgtt

SEQ ID NO: 57726 - DNA, 20 bp, Streptococcus pyogenes
aaacgttctgttactaaagc

SEQ ID NO: 57727 - DNA, 20 bp, Streptococcus pyogenes
tgttactaaagctggtactc

SEQ ID NO: 57728 - DNA, 20 bp, Streptococcus pyogenes
ctaaagctggtactcttcaa

SEQ ID NO: 57729 - DNA, 20 bp, Streptococcus pyogenes
aagaatcacgtaaacgtgaa

SEQ ID NO: 57730 - DNA, 20 bp, Streptococcus pyogenes
ctttttaggcatagcttttt

SEQ ID NO: 57731 - DNA, 20 bp, Streptococcus pyogenes
ttaggcatagctttttcagc

SEQ ID NO: 57732 - DNA, 20 bp, Streptococcus pyogenes
taggcatagctttttcagcg

SEQ ID NO: 57733 - DNA, 20 bp, Streptococcus pyogenes
aggcatagctttttcagcgg

SEQ ID NO: 57734 - DNA, 20 bp, Streptococcus pyogenes
ggcatagctttttcagcggc

SEQ ID NO: 57735 - DNA, 20 bp, Streptococcus pyogenes
ttatggggaggtgacgattt

SEQ ID NO: 57736 - DNA, 20 bp, Streptococcus pyogenes
tatggggaggtgacgatttg

SEQ ID NO: 57737 - DNA, 20 bp, Streptococcus pyogenes
atggggaggtgacgatttgg

SEQ ID NO: 57738 - DNA, 20 bp, Streptococcus pyogenes
tggggaggtgacgatttggc

SEQ ID NO: 57739 - DNA, 20 bp, Streptococcus pyogenes
ggcaattgacaaagaaatga

SEQ ID NO: 57740 - DNA, 20 bp, Streptococcus pyogenes
agattattgccgataagact

SEQ ID NO: 57741 - DNA, 20 bp, Streptococcus pyogenes
ttgccgataagactggtatg

SEQ ID NO: 57742 - DNA, 20 bp, Streptococcus pyogenes
ccgataagactggtatgtcg

SEQ ID NO: 57743 - DNA, 20 bp, Streptococcus pyogenes
atataccgccaagtcaggca

SEQ ID NO: 57744 - DNA, 20 bp, Streptococcus pyogenes
ctagccaacacaagcaccct

SEQ ID NO: 57745 - DNA, 20 bp, Streptococcus pyogenes
cttcaggattgtttcacttg

SEQ ID NO: 57746 - DNA, 20 bp, Streptococcus pyogenes
aggattgtttcacttgtccg

SEQ ID NO: 57747 - DNA, 20 bp, Streptococcus pyogenes
tttcacttgtccgatcaatc

SEQ ID NO: 57748 - DNA, 20 bp, Streptococcus pyogenes
cacttgtccgatcaatccaa

SEQ ID NO: 57749 - DNA, 20 bp, Streptococcus pyogenes
acttgtccgatcaatccaat

SEQ ID NO: 57750 - DNA, 20 bp, Streptococcus pyogenes
cttcaatggggacggcattg

SEQ ID NO: 57751 - DNA, 20 bp, Streptococcus pyogenes
aatggggacggcattgactc

SEQ ID NO: 57752 - DNA, 20 bp, Streptococcus pyogenes
actcaagaacatgtcaatca

SEQ ID NO: 57753 - DNA, 20 bp, Streptococcus pyogenes
agcaagtcactaaaaaagtt

SEQ ID NO: 57754 - DNA, 20 bp, Streptococcus pyogenes
ttttgatttatgatggtgac

SEQ ID NO: 57755 - DNA, 20 bp, Streptococcus pyogenes
ctcaatcaccatccatcaca

SEQ ID NO: 57756 - DNA, 20 bp, Streptococcus pyogenes
gtatattaacaagattgctg

SEQ ID NO: 57757 - DNA, 20 bp, Streptococcus pyogenes
acaagattgctgatttgttg

SEQ ID NO: 57758 - DNA, 20 bp, Streptococcus pyogenes
ctgatttgttgccaaacttt

SEQ ID NO: 57759 - DNA, 20 bp, Streptococcus pyogenes
gttgccaaactttgactatt

SEQ ID NO: 57760 - DNA, 20 bp, Streptococcus pyogenes
tagcagagcgcgatcttcac

SEQ ID NO: 57761 - DNA, 20 bp, Streptococcus pyogenes
agcagagcgcgatcttcaca

SEQ ID NO: 57762 - DNA, 20 bp, Streptococcus pyogenes
gcagagcgcgatcttcacaa

SEQ ID NO: 57763 - DNA, 20 bp, Streptococcus pyogenes
acaaacaagggaaaaaagtt

SEQ ID NO: 57764 - DNA, 20 bp, Streptococcus pyogenes
gagaatctagtaacaaaggc

SEQ ID NO: 57765 - DNA, 20 bp, Streptococcus pyogenes
gtggctgcttttaaatcaac

SEQ ID NO: 57766 - DNA, 20 bp, Streptococcus pyogenes
taaatcaaccctagaagaaa

SEQ ID NO: 57767 - DNA, 20 bp, Streptococcus pyogenes
aaatcaaccctagaagaaag

SEQ ID NO: 57768 - DNA, 20 bp, Streptococcus pyogenes
aatcaaccctagaagaaagc

SEQ ID NO: 57769 - DNA, 20 bp, Streptococcus pyogenes
gctgttacatgtgattgatg

SEQ ID NO: 57770 - DNA, 20 bp, Streptococcus pyogenes
gaatcgagttgctcttttag

SEQ ID NO: 57771 - DNA, 20 bp, Streptococcus pyogenes
aatcgagttgctcttttaga

SEQ ID NO: 57772 - DNA, 20 bp, Streptococcus pyogenes
ctcttttagaccactacacg

SEQ ID NO: 57773 - DNA, 20 bp, Streptococcus pyogenes
tagaccactacacgtttgac

SEQ ID NO: 57774 - DNA, 20 bp, Streptococcus pyogenes
agaccactacacgtttgacc

SEQ ID NO: 57775 - DNA, 20 bp, Streptococcus pyogenes
ttattttaatctttctaagg

SEQ ID NO: 57776 - DNA, 20 bp, Streptococcus pyogenes
ttttaatctttctaaggctt

SEQ ID NO: 57777 - DNA, 20 bp, Streptococcus pyogenes
taatctttctaaggctttgg

SEQ ID NO: 57778 - DNA, 20 bp, Streptococcus pyogenes
aatctttctaaggctttggg

SEQ ID NO: 57779 - DNA, 20 bp, Streptococcus pyogenes
atctttctaaggctttgggg

SEQ ID NO: 57780 - DNA, 20 bp, Streptococcus pyogenes
tcgaagatttaccgtctggc

SEQ ID NO: 57781 - DNA, 20 bp, Streptococcus pyogenes
accgtctggcaaacggtatc

SEQ ID NO: 57782 - DNA, 20 bp, Streptococcus pyogenes
ccgtctggcaaacggtatca

SEQ ID NO: 57783 - DNA, 20 bp, Streptococcus pyogenes
aggggtttaatgtagaggag

SEQ ID NO: 57784 - DNA, 20 bp, Streptococcus pyogenes
aatgtagaggagttatgggc

SEQ ID NO: 57785 - DNA, 20 bp, Streptococcus pyogenes
tagaaacgacgattaagcca

SEQ ID NO: 57786 - DNA, 20 bp, Streptococcus pyogenes
agaaacgacgattaagccac

SEQ ID NO: 57787 - DNA, 20 bp, Streptococcus pyogenes
gaaacgacgattaagccacg

SEQ ID NO: 57788 - DNA, 20 bp, Streptococcus pyogenes
agccacgaaaaataagaaag

SEQ ID NO: 57789 - DNA, 20 bp, Streptococcus pyogenes
tcattactcatttgcatgga

SEQ ID NO: 57790 - DNA, 20 bp, Streptococcus pyogenes
tttgcatgggttatcgagta

SEQ ID NO: 57791 - DNA, 20 bp, Streptococcus pyogenes
ttgcatgggttatcgagtag

SEQ ID NO: 57792 - DNA, 20 bp, Streptococcus pyogenes
tgcatgggttatcgagtagt

SEQ ID NO: 57793 - DNA, 20 bp, Streptococcus pyogenes
gcatgggttatcgagtagtt

SEQ ID NO: 57794 - DNA, 20 bp, Streptococcus pyogenes
catgggttatcgagtagttc

SEQ ID NO: 57795 - DNA, 20 bp, Streptococcus pyogenes
taccaacatgcaggcagcac

SEQ ID NO: 57796 - DNA, 20 bp, Streptococcus pyogenes
ctcaatcatgtatcagctcg

SEQ ID NO: 57797 - DNA, 20 bp, Streptococcus pyogenes
ttagggcgtgattgtcgcca

SEQ ID NO: 57798 - DNA, 20 bp, Streptococcus pyogenes
tagggcgtgattgtcgccag

SEQ ID NO: 57799 - DNA, 20 bp, Streptococcus pyogenes
agggcgtgattgtcgccaga

SEQ ID NO: 57800 - DNA, 20 bp, Streptococcus pyogenes
tcagcatattgacaacaaag

SEQ ID NO: 57801 - DNA, 20 bp, Streptococcus pyogenes
acaacaaagaatgcctcgag

SEQ ID NO: 57802 - DNA, 20 bp, Streptococcus pyogenes
gatattaccaatccagtagc

SEQ ID NO: 57803 - DNA, 20 bp, Streptococcus pyogenes
ccaatccagtagccattgag

SEQ ID NO: 57804 - DNA, 20 bp, Streptococcus pyogenes
agaaaatggtcgcccagatt

SEQ ID NO: 57805 - DNA, 20 bp, Streptococcus pyogenes
attcagccaccaagtttgcc

SEQ ID NO: 57806 - DNA, 20 bp, Streptococcus pyogenes
ttcagccaccaagtttgccc

SEQ ID NO: 57807 - DNA, 20 bp, Streptococcus pyogenes
agccaccaagtttgccctta

SEQ ID NO: 57808 - DNA, 20 bp, Streptococcus pyogenes
gcccttatcggattttccaa

SEQ ID NO: 57809 - DNA, 20 bp, Streptococcus pyogenes
cccttatcggattttccaat

SEQ ID NO: 57810 - DNA, 20 bp, Streptococcus pyogenes
gatgagtttttaacagcgga

SEQ ID NO: 57811 - DNA, 20 bp, Streptococcus pyogenes
ttaacagcggacttgtctca

SEQ ID NO: 57812 - DNA, 20 bp, Streptococcus pyogenes
taacagcggacttgtctcaa

SEQ ID NO: 57813 - DNA, 20 bp, Streptococcus pyogenes
aacagcggacttgtctcaac

SEQ ID NO: 57814 - DNA, 20 bp, Streptococcus pyogenes
acagcggacttgtctcaact

SEQ ID NO: 57815 - DNA, 20 bp, Streptococcus pyogenes
ttgacacgcctaaacgggtt

SEQ ID NO: 57816 - DNA, 20 bp, Streptococcus pyogenes
acacgcctaaacgggttgct

SEQ ID NO: 57817 - DNA, 20 bp, Streptococcus pyogenes
ctaaaatgtatgcggagatg

SEQ ID NO: 57818 - DNA, 20 bp, Streptococcus pyogenes
ttgggactgggaaaagatcc

SEQ ID NO: 57819 - DNA, 20 bp, Streptococcus pyogenes
tgggactgggaaaagatcct

SEQ ID NO: 57820 - DNA, 20 bp, Streptococcus pyogenes
gacctctcaaatagcggatg

SEQ ID NO: 57821 - DNA, 20 bp, Streptococcus pyogenes
acctctcaaatagcggatgc

SEQ ID NO: 57822 - DNA, 20 bp, Streptococcus pyogenes
agttgaagccctcaatccta

SEQ ID NO: 57823 - DNA, 20 bp, Streptococcus pyogenes
gttgaagccctcaatcctaa

SEQ ID NO: 57824 - DNA, 20 bp, Streptococcus pyogenes
aagccctcaatcctaaaggg

SEQ ID NO: 57825 - DNA, 20 bp, Streptococcus pyogenes
cactactgtgcaaaaagcat

SEQ ID NO: 57826 - DNA, 20 bp, Streptococcus pyogenes
gatcacgttgagcaaatgat

SEQ ID NO: 57827 - DNA, 20 bp, Streptococcus pyogenes
agcaaatgattgctgatggg

SEQ ID NO: 57828 - DNA, 20 bp, Streptococcus pyogenes
ctgatggggctaaaatcatc

SEQ ID NO: 57829 - DNA, 20 bp, Streptococcus pyogenes
gtggagaatcaacacgtcca

SEQ ID NO: 57830 - DNA, 20 bp, Streptococcus pyogenes
atgcataaccaagacgaaga

SEQ ID NO: 57831 - DNA, 20 bp, Streptococcus pyogenes
atcaagaggtaacacaagac

SEQ ID NO: 57832 - DNA, 20 bp, Streptococcus pyogenes
tcaagaggtaacacaagacg

SEQ ID NO: 57833 - DNA, 20 bp, Streptococcus pyogenes
gtgattttctaggcaataga

SEQ ID NO: 57834 - DNA, 20 bp, Streptococcus pyogenes
tgattttctaggcaatagag

SEQ ID NO: 57835 - DNA, 20 bp, Streptococcus pyogenes
tgcccttggaaaaggctgtc

SEQ ID NO: 57836 - DNA, 20 bp, Streptococcus pyogenes
gaaaaggctgtcagattgta

SEQ ID NO: 57837 - DNA, 20 bp, Streptococcus pyogenes
tacgcgtacacgatgtcaag

SEQ ID NO: 57838 - DNA, 20 bp, Streptococcus pyogenes
tggctgtgttgagccagttg

SEQ ID NO: 57839 - DNA, 20 bp, Streptococcus pyogenes
agccagttgatgtgaggact

SEQ ID NO: 57840 - DNA, 20 bp, Streptococcus pyogenes
attttgattgaacgtttagc

SEQ ID NO: 57841 - DNA, 20 bp, Streptococcus pyogenes
ttttgattgaacgtttagca

SEQ ID NO: 57842 - DNA, 20 bp, Streptococcus pyogenes
tgattgaacgtttagcaggt

SEQ ID NO: 57843 - DNA, 20 bp, Streptococcus pyogenes
gattgaacgtttagcaggtg

SEQ ID NO: 57844 - DNA, 20 bp, Streptococcus pyogenes
attgaacgtttagcaggtgc

SEQ ID NO: 57845 - DNA, 20 bp, Streptococcus pyogenes
accgcggctgatttcttaaa

SEQ ID NO: 57846 - DNA, 20 bp, Streptococcus pyogenes
cttaaaagaaacacaagcta

SEQ ID NO: 57847 - DNA, 20 bp, Streptococcus pyogenes
ttaaaagaaacacaagctat

SEQ ID NO: 57848 - DNA, 20 bp, Streptococcus pyogenes
aaagaaacacaagctattga

SEQ ID NO: 57849 - DNA, 20 bp, Streptococcus pyogenes
agcaatctcttggtcgtgtg

SEQ ID NO: 57850 - DNA, 20 bp, Streptococcus pyogenes
cactaaggtaggtggcccag

SEQ ID NO: 57851 - DNA, 20 bp, Streptococcus pyogenes
cttggcttttcctagaaatc

SEQ ID NO: 57852 - DNA, 20 bp, Streptococcus pyogenes
ttggcttttcctagaaatca

SEQ ID NO: 57853 - DNA, 20 bp, Streptococcus pyogenes
gcttttcctagaaatcacta

SEQ ID NO: 57854 - DNA, 20 bp, Streptococcus pyogenes
tcctagaaatcactacgagc

SEQ ID NO: 57855 - DNA, 20 bp, Streptococcus pyogenes
ctggaagcattgggggtgct

SEQ ID NO: 57856 - DNA, 20 bp, Streptococcus pyogenes
ggggtgctgtttttatgaat

SEQ ID NO: 57857 - DNA, 20 bp, Streptococcus pyogenes
ttatgaatgcgggtgcttat

SEQ ID NO: 57858 - DNA, 20 bp, Streptococcus pyogenes
tatgaatgcgggtgcttatg

SEQ ID NO: 57859 - DNA, 20 bp, Streptococcus pyogenes
atgaatgcgggtgcttatgg

SEQ ID NO: 57860 - DNA, 20 bp, Streptococcus pyogenes
gcaggtcaattaatcatgga

SEQ ID NO: 57861 - DNA, 20 bp, Streptococcus pyogenes
caggtcaattaatcatggaa

SEQ ID NO: 57862 - DNA, 20 bp, Streptococcus pyogenes
atcatggaagcaaatcttaa

SEQ ID NO: 57863 - DNA, 20 bp, Streptococcus pyogenes
aagggcatcggattggtggt

SEQ ID NO: 57864 - DNA, 20 bp, Streptococcus pyogenes
gtggtgtggaagtttccgaa

SEQ ID NO: 57865 - DNA, 20 bp, Streptococcus pyogenes
aaactgcacaacgaaaatca

SEQ ID NO: 57866 - DNA, 20 bp, Streptococcus pyogenes
agattctgtcttccctacca

SEQ ID NO: 57867 - DNA, 20 bp, Streptococcus pyogenes
tgtcttccctaccatctgtg

SEQ ID NO: 57868 - DNA, 20 bp, Streptococcus pyogenes
cctaccatctgtggttgtgg

SEQ ID NO: 57869 - DNA, 20 bp, Streptococcus pyogenes
tggggctctttggttacttg

SEQ ID NO: 57870 - DNA, 20 bp, Streptococcus pyogenes
tttagcgttcataatttctc

SEQ ID NO: 57871 - DNA, 20 bp, Streptococcus pyogenes
ttagcgttcataatttctct

SEQ ID NO: 57872 - DNA, 20 bp, Streptococcus pyogenes
tagcgttcataatttctctt

SEQ ID NO: 57873 - DNA, 20 bp, Streptococcus pyogenes
agcgttcataatttctcttt

SEQ ID NO: 57874 - DNA, 20 bp, Streptococcus pyogenes
gcgttcataatttctctttc

SEQ ID NO: 57875 - DNA, 20 bp, Streptococcus pyogenes
aggacaacacgccaaatggt

SEQ ID NO: 57876 - DNA, 20 bp, Streptococcus pyogenes
gccaacgtgttgctcccata

SEQ ID NO: 57877 - DNA, 20 bp, Streptococcus pyogenes
ccaacgtgttgctcccatag

SEQ ID NO: 57878 - DNA, 20 bp, Streptococcus pyogenes
ctcccatagccatagacgct

SEQ ID NO: 57879 - DNA, 20 bp, Streptococcus pyogenes
gcggtaatgacgaggcaccg

SEQ ID NO: 57880 - DNA, 20 bp, Streptococcus pyogenes
aggtgagatttcagtcataa

SEQ ID NO: 57881 - DNA, 20 bp, Streptococcus pyogenes
ggtgagatttcagtcataaa

SEQ ID NO: 57882 - DNA, 20 bp, Streptococcus pyogenes
cagtcataaaaacggctgcg

SEQ ID NO: 57883 - DNA, 20 bp, Streptococcus pyogenes
agtcataaaaacggctgcgc

SEQ ID NO: 57884 - DNA, 20 bp, Streptococcus pyogenes
gcagagcaccaagataagga

SEQ ID NO: 57885 - DNA, 20 bp, Streptococcus pyogenes
aattctttgatggtgaggct

SEQ ID NO: 57886 - DNA, 20 bp, Streptococcus pyogenes
tttgatggtgaggctaattt

SEQ ID NO: 57887 - DNA, 20 bp, Streptococcus pyogenes
gatggtgaggctaatttttt

SEQ ID NO: 57888 - DNA, 20 bp, Streptococcus pyogenes
atggtgaggctaatttttta

SEQ ID NO: 57889 - DNA, 20 bp, Streptococcus pyogenes
tttagccaattcctgatttt

SEQ ID NO: 57890 - DNA, 20 bp, Streptococcus pyogenes
caaagatttaacagatgaat

SEQ ID NO: 57891 - DNA, 20 bp, Streptococcus pyogenes
aacagatgaatcaacgtagg

SEQ ID NO: 57892 - DNA, 20 bp, Streptococcus pyogenes
acagatgaatcaacgtaggc

SEQ ID NO: 57893 - DNA, 20 bp, Streptococcus pyogenes
gtgaaacaatcgatttaacc

SEQ ID NO: 57894 - DNA, 20 bp, Streptococcus pyogenes
tgaaacaatcgatttaacca

SEQ ID NO: 57895 - DNA, 20 bp, Streptococcus pyogenes
atgatcaactaatttagaag

SEQ ID NO: 57896 - DNA, 20 bp, Streptococcus pyogenes
agaagcatcaataccatctt

SEQ ID NO: 57897 - DNA, 20 bp, Streptococcus pyogenes
gaagcatcaataccatcttt

SEQ ID NO: 57898 - DNA, 20 bp, Streptococcus pyogenes
ttcttccgcaaagacatcac

SEQ ID NO: 57899 - DNA, 20 bp, Streptococcus pyogenes
tcttccgcaaagacatcact

SEQ ID NO: 57900 - DNA, 20 bp, Streptococcus pyogenes
gcaaatcctagaccattgcc

SEQ ID NO: 57901 - DNA, 20 bp, Streptococcus pyogenes
ccattaatgagtaattggta

SEQ ID NO: 57902 - DNA, 20 bp, Streptococcus pyogenes
atgagtaattggtaccagcc

SEQ ID NO: 57903 - DNA, 20 bp, Streptococcus pyogenes
gtaccagcctgttggataag

SEQ ID NO: 57904 - DNA, 20 bp, Streptococcus pyogenes
gataagattggggcaaagta

SEQ ID NO: 57905 - DNA, 20 bp, Streptococcus pyogenes
ctgatagggtaaggtttaga

SEQ ID NO: 57906 - DNA, 20 bp, Streptococcus pyogenes
agatggtctttttcaaacat

SEQ ID NO: 57907 - DNA, 20 bp, Streptococcus pyogenes
gatggtctttttcaaacatt

SEQ ID NO: 57908 - DNA, 20 bp, Streptococcus pyogenes
ttcaaacattttccaaagac

SEQ ID NO: 57909 - DNA, 20 bp, Streptococcus pyogenes
tcaaacattttccaaagacg

SEQ ID NO: 57910 - DNA, 20 bp, Streptococcus pyogenes
taacatggctaaggcgtctt

SEQ ID NO: 57911 - DNA, 20 bp, Streptococcus pyogenes
aacatggctaaggcgtcttc

SEQ ID NO: 57912 - DNA, 20 bp, Streptococcus pyogenes
acatggctaaggcgtcttct

SEQ ID NO: 57913 - DNA, 20 bp, Streptococcus pyogenes
taaaatagatttttgcaact

SEQ ID NO: 57914 - DNA, 20 bp, Streptococcus pyogenes
ttgcaacttggcacattctg

SEQ ID NO: 57915 - DNA, 20 bp, Streptococcus pyogenes
gtcaacacggaaaacttttg

SEQ ID NO: 57916 - DNA, 20 bp, Streptococcus pyogenes
tgggcgtgtagtcactaaga

SEQ ID NO: 57917 - DNA, 20 bp, Streptococcus pyogenes
gggcgtgtagtcactaagac

SEQ ID NO: 57918 - DNA, 20 bp, Streptococcus pyogenes
ggcgtgtagtcactaagacc

SEQ ID NO: 57919 - DNA, 20 bp, Streptococcus pyogenes
ctccagagtaatgacctcgg

SEQ ID NO: 57920 - DNA, 20 bp, Streptococcus pyogenes
tgtcatcccaatcgtgcttt

SEQ ID NO: 57921 - DNA, 20 bp, Streptococcus pyogenes
cgactgtcacgtcactgatt

SEQ ID NO: 57922 - DNA, 20 bp, Streptococcus pyogenes
gactgtcacgtcactgattc

SEQ ID NO: 57923 - DNA, 20 bp, Streptococcus pyogenes
cagcaattttatagaggctg

SEQ ID NO: 57924 - DNA, 20 bp, Streptococcus pyogenes
tatagaggctgtcctgaact

SEQ ID NO: 57925 - DNA, 20 bp, Streptococcus pyogenes
agttactctccattatacca

SEQ ID NO: 57926 - DNA, 20 bp, Streptococcus pyogenes
gttactctccattataccat

SEQ ID NO: 57927 - DNA, 20 bp, Streptococcus pyogenes
ctctccattataccatatct

SEQ ID NO: 57928 - DNA, 20 bp, Streptococcus pyogenes
taccatatcttagcgcagac

SEQ ID NO: 57929 - DNA, 20 bp, Streptococcus pyogenes
gcgcagacctaatttggcta

SEQ ID NO: 57930 - DNA, 20 bp, Streptococcus pyogenes
ctgccggacggttcgtccga

SEQ ID NO: 57931 - DNA, 20 bp, Streptococcus pyogenes
gtccgaaatctccttcgtca

SEQ ID NO: 57932 - DNA, 20 bp, Streptococcus pyogenes
gtcatctttacggaaacgag

SEQ ID NO: 57933 - DNA, 20 bp, Streptococcus pyogenes
acggaaacgagcatagttga

SEQ ID NO: 57934 - DNA, 20 bp, Streptococcus pyogenes
cggaaacgagcatagttgag

SEQ ID NO: 57935 - DNA, 20 bp, Streptococcus pyogenes
ttgctctccaagattaaatg

SEQ ID NO: 57936 - DNA, 20 bp, Streptococcus pyogenes
ctctccaagattaaatgcac

SEQ ID NO: 57937 - DNA, 20 bp, Streptococcus pyogenes
aatgcactatttaatttaag

SEQ ID NO: 57938 - DNA, 20 bp, Streptococcus pyogenes
aatttaagatcatacgaatt

SEQ ID NO: 57939 - DNA, 20 bp, Streptococcus pyogenes
atttaagatcatacgaatta

SEQ ID NO: 57940 - DNA, 20 bp, Streptococcus pyogenes
catacatccttttttcttat

SEQ ID NO: 57941 - DNA, 20 bp, Streptococcus pyogenes
atacatccttttttcttatg

SEQ ID NO: 57942 - DNA, 20 bp, Streptococcus pyogenes
tttcttatgcttcctttttt

SEQ ID NO: 57943 - DNA, 20 bp, Streptococcus pyogenes
ttcttatgcttccttttttg

SEQ ID NO: 57944 - DNA, 20 bp, Streptococcus pyogenes
tcttatgcttccttttttga

SEQ ID NO: 57945 - DNA, 20 bp, Streptococcus pyogenes
tcgattttcttgtaaaacca

SEQ ID NO: 57946 - DNA, 20 bp, Streptococcus pyogenes
tcttgtaaaaccactacacc

SEQ ID NO: 57947 - DNA, 20 bp, Streptococcus pyogenes
cttgtaaaaccactacaccg

SEQ ID NO: 57948 - DNA, 20 bp, Streptococcus pyogenes
ttgtaaaaccactacaccgc

SEQ ID NO: 57949 - DNA, 20 bp, Streptococcus pyogenes
taaaaccactacaccgccac

SEQ ID NO: 57950 - DNA, 20 bp, Streptococcus pyogenes
ttctttatccaaatggacct

SEQ ID NO: 57951 - DNA, 20 bp, Streptococcus pyogenes
tttatccaaatggacctgtc

SEQ ID NO: 57952 - DNA, 20 bp, Streptococcus pyogenes
atccaaatggacctgtcctt

SEQ ID NO: 57953 - DNA, 20 bp, Streptococcus pyogenes
tccaaatggacctgtccttg

SEQ ID NO: 57954 - DNA, 20 bp, Streptococcus pyogenes
tttaacaagcaaggctgcaa

SEQ ID NO: 57955 - DNA, 20 bp, Streptococcus pyogenes
atcaatcaatcgagggataa

SEQ ID NO: 57956 - DNA, 20 bp, Streptococcus pyogenes
ctttcatgttagaatatacc

SEQ ID NO: 57957 - DNA, 20 bp, Streptococcus pyogenes
catgttagaatataccactc

SEQ ID NO: 57958 - DNA, 20 bp, Streptococcus pyogenes
atgttagaatataccactcg

SEQ ID NO: 57959 - DNA, 20 bp, Streptococcus pyogenes
gaatataccactcgaatact

SEQ ID NO: 57960 - DNA, 20 bp, Streptococcus pyogenes
accatcaactatcaatcgtc

SEQ ID NO: 57961 - DNA, 20 bp, Streptococcus pyogenes
ccatcaactatcaatcgtcc

SEQ ID NO: 57962 - DNA, 20 bp, Streptococcus pyogenes
ttgaatcatttcttctgtat

SEQ ID NO: 57963 - DNA, 20 bp, Streptococcus pyogenes
aatcatttcttctgtatggt

SEQ ID NO: 57964 - DNA, 20 bp, Streptococcus pyogenes
cttctgtatggtttcgagta

SEQ ID NO: 57965 - DNA, 20 bp, Streptococcus pyogenes
caatgatttaccgataatct

SEQ ID NO: 57966 - DNA, 20 bp, Streptococcus pyogenes
accgataatcttagcatttc

SEQ ID NO: 57967 - DNA, 20 bp, Streptococcus pyogenes
ccgataatcttagcatttcg

SEQ ID NO: 57968 - DNA, 20 bp, Streptococcus pyogenes
gcatttcgcgcttcttccaa

SEQ ID NO: 57969 - DNA, 20 bp, Streptococcus pyogenes
cgcgcttcttccaaagcttt

SEQ ID NO: 57970 - DNA, 20 bp, Streptococcus pyogenes
gcagcttcaatatagacaac

SEQ ID NO: 57971 - DNA, 20 bp, Streptococcus pyogenes
aatatagacaacgtctttag

SEQ ID NO: 57972 - DNA, 20 bp, Streptococcus pyogenes
agcaaaatcaagatagaagg

SEQ ID NO: 57973 - DNA, 20 bp, Streptococcus pyogenes
gcaaaatcaagatagaaggc

SEQ ID NO: 57974 - DNA, 20 bp, Streptococcus pyogenes
accactgctttgtaaatagc

SEQ ID NO: 57975 - DNA, 20 bp, Streptococcus pyogenes
tcggtatccacagaagctac

SEQ ID NO: 57976 - DNA, 20 bp, Streptococcus pyogenes
tttagccacatcattaggag

SEQ ID NO: 57977 - DNA, 20 bp, Streptococcus pyogenes
agccacatcattaggagaaa

SEQ ID NO: 57978 - DNA, 20 bp, Streptococcus pyogenes
gccacatcattaggagaaat

SEQ ID NO: 57979 - DNA, 20 bp, Streptococcus pyogenes
ggagaaatgatattgccttt

SEQ ID NO: 57980 - DNA, 20 bp, Streptococcus pyogenes
cttttgtaaactcgccattt

SEQ ID NO: 57981 - DNA, 20 bp, Streptococcus pyogenes
ttttgtaaactcgccatttg

SEQ ID NO: 57982 - DNA, 20 bp, Streptococcus pyogenes
tgtaaactcgccatttggtg

SEQ ID NO: 57983 - DNA, 20 bp, Streptococcus pyogenes
gtaaactcgccatttggtga

SEQ ID NO: 57984 - DNA, 20 bp, Streptococcus pyogenes
taaactcgccatttggtgac

SEQ ID NO: 57985 - DNA, 20 bp, Streptococcus pyogenes
ttttttcaatttcatccaaa

SEQ ID NO: 57986 - DNA, 20 bp, Streptococcus pyogenes
tttcaatttcatccaaaata

SEQ ID NO: 57987 - DNA, 20 bp, Streptococcus pyogenes
ttcaatttcatccaaaatat

SEQ ID NO: 57988 - DNA, 20 bp, Streptococcus pyogenes
tcaatttcatccaaaatatc

SEQ ID NO: 57989 - DNA, 20 bp, Streptococcus pyogenes
caatttcatccaaaatatct

SEQ ID NO: 57990 - DNA, 20 bp, Streptococcus pyogenes
ttctacgtcagtatcccatg

SEQ ID NO: 57991 - DNA, 20 bp, Streptococcus pyogenes
tacgtcagtatcccatgggt

SEQ ID NO: 57992 - DNA, 20 bp, Streptococcus pyogenes
gttatccttggtgaccatgt

SEQ ID NO: 57993 - DNA, 20 bp, Streptococcus pyogenes
tccttggtgaccatgttacc

SEQ ID NO: 57994 - DNA, 20 bp, Streptococcus pyogenes
gtgaccatgttacccttgag

SEQ ID NO: 57995 - DNA, 20 bp, Streptococcus pyogenes
accatctttaactttattgg

SEQ ID NO: 57996 - DNA, 20 bp, Streptococcus pyogenes
ccatctttaactttattggc

SEQ ID NO: 57997 - DNA, 20 bp, Streptococcus pyogenes
aactttattggcgtagtata

SEQ ID NO: 57998 - DNA, 20 bp, Streptococcus pyogenes
actttattggcgtagtataa

SEQ ID NO: 57999 - DNA, 20 bp, Streptococcus pyogenes
attggcgtagtataaagagg

SEQ ID NO: 58000 - DNA, 20 bp, Streptococcus pyogenes
acgacacatctcaaggtatt

SEQ ID NO: 58001 - DNA, 20 bp, Streptococcus pyogenes
tgctaaatccatctccttac

SEQ ID NO: 58002 - DNA, 20 bp, Streptococcus pyogenes
cgtttgattccttgcttagc

SEQ ID NO: 58003 - DNA, 20 bp, Streptococcus pyogenes
gattccttgcttagccaaga

SEQ ID NO: 58004 - DNA, 20 bp, Streptococcus pyogenes
attccttgcttagccaagac

SEQ ID NO: 58005 - DNA, 20 bp, Streptococcus pyogenes
ccattgtggctctttattag

SEQ ID NO: 58006 - DNA, 20 bp, Streptococcus pyogenes
tggctctttattaggaagac

SEQ ID NO: 58007 - DNA, 20 bp, Streptococcus pyogenes
attaggaagacctgcgcgca

SEQ ID NO: 58008 - DNA, 20 bp, Streptococcus pyogenes
ttaggaagacctgcgcgcat

SEQ ID NO: 58009 - DNA, 20 bp, Streptococcus pyogenes
ggaagacctgcgcgcattgg

SEQ ID NO: 58010 - DNA, 20 bp, Streptococcus pyogenes
tttttctttatttagatatt

SEQ ID NO: 58011 - DNA, 20 bp, Streptococcus pyogenes
ttctttatttagatatttaa

SEQ ID NO: 58012 - DNA, 20 bp, Streptococcus pyogenes
tctttatttagatatttaat

SEQ ID NO: 58013 - DNA, 20 bp, Streptococcus pyogenes
ctttatttagatatttaatt

SEQ ID NO: 58014 - DNA, 20 bp, Streptococcus pyogenes
tttatttagatatttaattt

SEQ ID NO: 58015 - DNA, 20 bp, Streptococcus pyogenes
aggttttttcgcagataatg

SEQ ID NO: 58016 - DNA, 20 bp, Streptococcus pyogenes
tttcgcagataatggctacg

SEQ ID NO: 58017 - DNA, 20 bp, Streptococcus pyogenes
ttcgcagataatggctacgc

SEQ ID NO: 58018 - DNA, 20 bp, Streptococcus pyogenes
tcgcagataatggctacgct

SEQ ID NO: 58019 - DNA, 20 bp, Streptococcus pyogenes
cgcagataatggctacgctt

SEQ ID NO: 58020 - DNA, 20 bp, Streptococcus pyogenes
gaacccgtgttaccgccgtg

SEQ ID NO: 58021 - DNA, 20 bp, Streptococcus pyogenes
ccgccgtgaaaaggcggtgt

SEQ ID NO: 58022 - DNA, 20 bp, Streptococcus pyogenes
accccttgaccaacggacca

SEQ ID NO: 58023 - DNA, 20 bp, Streptococcus pyogenes
accaacggaccataataata

SEQ ID NO: 58024 - DNA, 20 bp, Streptococcus pyogenes
tagataatgggcacgagtgg

SEQ ID NO: 58025 - DNA, 20 bp, Streptococcus pyogenes
agtgtgtcattaagctaagc

SEQ ID NO: 58026 - DNA, 20 bp, Streptococcus pyogenes
agctaagcgactaccttatc

SEQ ID NO: 58027 - DNA, 20 bp, Streptococcus pyogenes
tctcacagggggcaaccccc

SEQ ID NO: 58028 - DNA, 20 bp, Streptococcus pyogenes
tagggcttaactgctgtgtt

SEQ ID NO: 58029 - DNA, 20 bp, Streptococcus pyogenes
actgctgtgttcggcatggg

SEQ ID NO: 58030 - DNA, 20 bp, Streptococcus pyogenes
cctacatagctacccagcga

SEQ ID NO: 58031 - DNA, 20 bp, Streptococcus pyogenes
ggcaagacaactggtacacc

SEQ ID NO: 58032 - DNA, 20 bp, Streptococcus pyogenes
gcaagacaactggtacacca

SEQ ID NO: 58033 - DNA, 20 bp, Streptococcus pyogenes
cctacgcccgcgacggatag

SEQ ID NO: 58034 - DNA, 20 bp, Streptococcus pyogenes
ctacgcccgcgacggatagg

SEQ ID NO: 58035 - DNA, 20 bp, Streptococcus pyogenes
tatccgttgagcgatggccc

SEQ ID NO: 58036 - DNA, 20 bp, Streptococcus pyogenes
atccgttgagcgatggccct

SEQ ID NO: 58037 - DNA, 20 bp, Streptococcus pyogenes
tccgttgagcgatggccctt

SEQ ID NO: 58038 - DNA, 20 bp, Streptococcus pyogenes
agcgatggcccttccattcg

SEQ ID NO: 58039 - DNA, 20 bp, Streptococcus pyogenes
cattcggtaccaccggatca

SEQ ID NO: 58040 - DNA, 20 bp, Streptococcus pyogenes
cgatttagcagagagctgtg

SEQ ID NO: 58041 - DNA, 20 bp, Streptococcus pyogenes
agcagagagctgtgtttttg

SEQ ID NO: 58042 - DNA, 20 bp, Streptococcus pyogenes
gcagagagctgtgtttttga

SEQ ID NO: 58043 - DNA, 20 bp, Streptococcus pyogenes
ttgataaacagttgcttggg

SEQ ID NO: 58044 - DNA, 20 bp, Streptococcus pyogenes
tgataaacagttgcttgggc

SEQ ID NO: 58045 - DNA, 20 bp, Streptococcus pyogenes
gactcatcttacacctcact

SEQ ID NO: 58046 - DNA, 20 bp, Streptococcus pyogenes
actcatcttacacctcactg

SEQ ID NO: 58047 - DNA, 20 bp, Streptococcus pyogenes
cacctcactgcttagccgga

SEQ ID NO: 58048 - DNA, 20 bp, Streptococcus pyogenes
gccggactcttccaatcgtc

SEQ ID NO: 58049 - DNA, 20 bp, Streptococcus pyogenes
caatcgtccggtttagttag

SEQ ID NO: 58050 - DNA, 20 bp, Streptococcus pyogenes
tgtgtcatccacagcttcgg

SEQ ID NO: 58051 - DNA, 20 bp, Streptococcus pyogenes
gtgtcatccacagcttcggt

SEQ ID NO: 58052 - DNA, 20 bp, Streptococcus pyogenes
tgtcatccacagcttcggta

SEQ ID NO: 58053 - DNA, 20 bp, Streptococcus pyogenes
ggtaaactgttttagccccg

SEQ ID NO: 58054 - DNA, 20 bp, Streptococcus pyogenes
tagccccggtacattttcgg

SEQ ID NO: 58055 - DNA, 20 bp, Streptococcus pyogenes
attctacaaaaggcacgctc

SEQ ID NO: 58056 - DNA, 20 bp, Streptococcus pyogenes
tacaaaaggcacgctctcac

SEQ ID NO: 58057 - DNA, 20 bp, Streptococcus pyogenes
acgggctcgaacttgttgta

SEQ ID NO: 58058 - DNA, 20 bp, Streptococcus pyogenes
ttgtaggcacacggtttcag

SEQ ID NO: 58059 - DNA, 20 bp, Streptococcus pyogenes
taggcacacggtttcaggtt

SEQ ID NO: 58060 - DNA, 20 bp, Streptococcus pyogenes
catttccttagaaaggaggt

SEQ ID NO: 58061 - DNA, 20 bp, Streptococcus pyogenes
ccttagaaaggaggtgatcc

SEQ ID NO: 58062 - DNA, 20 bp, Streptococcus pyogenes
cttagaaaggaggtgatcca

SEQ ID NO: 58063 - DNA, 20 bp, Streptococcus pyogenes
gaaaggaggtgatccagccg

SEQ ID NO: 58064 - DNA, 20 bp, Streptococcus pyogenes
cgatacggctaccttgttac

SEQ ID NO: 58065 - DNA, 20 bp, Streptococcus pyogenes
gtcaacttcgtttttaaggt

SEQ ID NO: 58066 - DNA, 20 bp, Streptococcus pyogenes
gtttttaaggtcaacttctt

SEQ ID NO: 58067 - DNA, 20 bp, Streptococcus pyogenes
ttaaggtcaacttcttcttt

SEQ ID NO: 58068 - DNA, 20 bp, Streptococcus pyogenes
taaggtcaacttcttcttta

SEQ ID NO: 58069 - DNA, 20 bp, Streptococcus pyogenes
aaggtcaacttcttctttac

SEQ ID NO: 58070 - DNA, 20 bp, Streptococcus pyogenes
ggcgttcaccttgaagaaca

SEQ ID NO: 58071 - DNA, 20 bp, Streptococcus pyogenes
accttgaagaacatggatat

SEQ ID NO: 58072 - DNA, 20 bp, Streptococcus pyogenes
aagaacatggatatcaacag

SEQ ID NO: 58073 - DNA, 20 bp, Streptococcus pyogenes
gttgtctgctgctgttgaga

SEQ ID NO: 58074 - DNA, 20 bp, Streptococcus pyogenes
tctgctgctgttgagaagac

SEQ ID NO: 58075 - DNA, 20 bp, Streptococcus pyogenes
atcaatttctgacaatgaca

SEQ ID NO: 58076 - DNA, 20 bp, Streptococcus pyogenes
ctgacaatgacaatcctgca

SEQ ID NO: 58077 - DNA, 20 bp, Streptococcus pyogenes
tgacaatgacaatcctgcat

SEQ ID NO: 58078 - DNA, 20 bp, Streptococcus pyogenes
acgaactggagttttcgtac

SEQ ID NO: 58079 - DNA, 20 bp, Streptococcus pyogenes
tcgtacgttctacaaggtcg

SEQ ID NO: 58080 - DNA, 20 bp, Streptococcus pyogenes
caagaacgtcgaagacacca

SEQ ID NO: 58081 - DNA, 20 bp, Streptococcus pyogenes
aaggattgatacgtcaaatg

SEQ ID NO: 58082 - DNA, 20 bp, Streptococcus pyogenes
atacgtcaaatgtaccacca

SEQ ID NO: 58083 - DNA, 20 bp, Streptococcus pyogenes
gtttttgaccttggtggtgg

SEQ ID NO: 58084 - DNA, 20 bp, Streptococcus pyogenes
ttgaccttggtggtggtaca

SEQ ID NO: 58085 - DNA, 20 bp, Streptococcus pyogenes
cagcatcacccacgataatt

SEQ ID NO: 58086 - DNA, 20 bp, Streptococcus pyogenes
caccatttttgaatgatact

SEQ ID NO: 58087 - DNA, 20 bp, Streptococcus pyogenes
accatttttgaatgatacta

SEQ ID NO: 58088 - DNA, 20 bp, Streptococcus pyogenes
ttgaatgatactactgaagg

SEQ ID NO: 58089 - DNA, 20 bp, Streptococcus pyogenes
tgaatgatactactgaagga

SEQ ID NO: 58090 - DNA, 20 bp, Streptococcus pyogenes
ctgtcattacggacaaaaac

SEQ ID NO: 58091 - DNA, 20 bp, Streptococcus pyogenes
cggacaaaaacgaaaactca

SEQ ID NO: 58092 - DNA, 20 bp, Streptococcus pyogenes
accttagttataaacaacta

SEQ ID NO: 58093 - DNA, 20 bp, Streptococcus pyogenes
ccttagttataaacaactac

SEQ ID NO: 58094 - DNA, 20 bp, Streptococcus pyogenes
gttataaacaactaccatcg

SEQ ID NO: 58095 - DNA, 20 bp, Streptococcus pyogenes
tcaagcgatggtaagattgc

SEQ ID NO: 58096 - DNA, 20 bp, Streptococcus pyogenes
cttttgccagatcctgagaa

SEQ ID NO: 58097 - DNA, 20 bp, Streptococcus pyogenes
tgccagatcctgagaacgat

SEQ ID NO: 58098 - DNA, 20 bp, Streptococcus pyogenes
gccagatcctgagaacgata

SEQ ID NO: 58099 - DNA, 20 bp, Streptococcus pyogenes
ccagatcctgagaacgatag

SEQ ID NO: 58100 - DNA, 20 bp, Streptococcus pyogenes
ccaataatgtttaccaaact

SEQ ID NO: 58101 - DNA, 20 bp, Streptococcus pyogenes
caataatgtttaccaaacta

SEQ ID NO: 58102 - DNA, 20 bp, Streptococcus pyogenes
accaaactaacagacctacg

SEQ ID NO: 58103 - DNA, 20 bp, Streptococcus pyogenes
ccaaactaacagacctacga

SEQ ID NO: 58104 - DNA, 20 bp, Streptococcus pyogenes
ttgattccttaccgtgggtt

SEQ ID NO: 58105 - DNA, 20 bp, Streptococcus pyogenes
aaatgctatcaagtcacgtg

SEQ ID NO: 58106 - DNA, 20 bp, Streptococcus pyogenes
aatgctatcaagtcacgtgt

SEQ ID NO: 58107 - DNA, 20 bp, Streptococcus pyogenes
cttggaatagcaaactgcac

SEQ ID NO: 58108 - DNA, 20 bp, Streptococcus pyogenes
ttggaatagcaaactgcact

SEQ ID NO: 58109 - DNA, 20 bp, Streptococcus pyogenes
gaatagcaaactgcactgtc

SEQ ID NO: 58110 - DNA, 20 bp, Streptococcus pyogenes
ttccaacaatcccaacttct

SEQ ID NO: 58111 - DNA, 20 bp, Streptococcus pyogenes
tccaacaatcccaacttctc

SEQ ID NO: 58112 - DNA, 20 bp, Streptococcus pyogenes
ccaacaatcccaacttctct

SEQ ID NO: 58113 - DNA, 20 bp, Streptococcus pyogenes
caacaatcccaacttctcta

SEQ ID NO: 58114 - DNA, 20 bp, Streptococcus pyogenes
tctagttttgccatatcatt

SEQ ID NO: 58115 - DNA, 20 bp, Streptococcus pyogenes
atgagattgccaatcaagtt

SEQ ID NO: 58116 - DNA, 20 bp, Streptococcus pyogenes
tgagattgccaatcaagttg

SEQ ID NO: 58117 - DNA, 20 bp, Streptococcus pyogenes
ccaatcaagttgctttctct

SEQ ID NO: 58118 - DNA, 20 bp, Streptococcus pyogenes
ctttctctggttctcgtgat

SEQ ID NO: 58119 - DNA, 20 bp, Streptococcus pyogenes
ctctggttctcgtgatagac

SEQ ID NO: 58120 - DNA, 20 bp, Streptococcus pyogenes
gccaaagaagtcctatctat

SEQ ID NO: 58121 - DNA, 20 bp, Streptococcus pyogenes
ccaaagaagtcctatctatc

SEQ ID NO: 58122 - DNA, 20 bp, Streptococcus pyogenes
ctctgtcattgatgatgata

SEQ ID NO: 58123 - DNA, 20 bp, Streptococcus pyogenes
atgatgataaaaaagcacta

SEQ ID NO: 58124 - DNA, 20 bp, Streptococcus pyogenes
tccttcgtccttatcagatt

SEQ ID NO: 58125 - DNA, 20 bp, Streptococcus pyogenes
gatgtcgatgagacagaaga

SEQ ID NO: 58126 - DNA, 20 bp, Streptococcus pyogenes
atgtcgatgagacagaagat

SEQ ID NO: 58127 - DNA, 20 bp, Streptococcus pyogenes
agaatccagcgatcgtcgtg

SEQ ID NO: 58128 - DNA, 20 bp, Streptococcus pyogenes
gaatccagcgatcgtcgtgt

SEQ ID NO: 58129 - DNA, 20 bp, Streptococcus pyogenes
tggtcaccaccattcaaaaa

SEQ ID NO: 58130 - DNA, 20 bp, Streptococcus pyogenes
ggtgatttagcccaaacaac

SEQ ID NO: 58131 - DNA, 20 bp, Streptococcus pyogenes
agcccaaacaacggaacagc

SEQ ID NO: 58132 - DNA, 20 bp, Streptococcus pyogenes
gcccaaacaacggaacagca

SEQ ID NO: 58133 - DNA, 20 bp, Streptococcus pyogenes
aagaagccattcatgataaa

SEQ ID NO: 58134 - DNA, 20 bp, Streptococcus pyogenes
atcatgaatggcttctttaa

SEQ ID NO: 58135 - DNA, 20 bp, Streptococcus pyogenes
aggctggtgaaacggattta

SEQ ID NO: 58136 - DNA, 20 bp, Streptococcus pyogenes
agtcatttctaagaaggtca

SEQ ID NO: 58137 - DNA, 20 bp, Streptococcus pyogenes
gtcatttctaagaaggtcaa

SEQ ID NO: 58138 - DNA, 20 bp, Streptococcus pyogenes
ctaagaaggtcaaagaaaaa

SEQ ID NO: 58139 - DNA, 20 bp, Streptococcus pyogenes
taagaaggtcaaagaaaaac

SEQ ID NO: 58140 - DNA, 20 bp, Streptococcus pyogenes
acaggttttgatgcgccttg

SEQ ID NO: 58141 - DNA, 20 bp, Streptococcus pyogenes
tgatgcgccttgtttatcaa

SEQ ID NO: 58142 - DNA, 20 bp, Streptococcus pyogenes
gatgcgccttgtttatcaac

SEQ ID NO: 58143 - DNA, 20 bp, Streptococcus pyogenes
atgcgccttgtttatcaacg

SEQ ID NO: 58144 - DNA, 20 bp, Streptococcus pyogenes
tttatcaacgatctttattg

SEQ ID NO: 58145 - DNA, 20 bp, Streptococcus pyogenes
tctcaaacaatacgccaaag

SEQ ID NO: 58146 - DNA, 20 bp, Streptococcus pyogenes
ctcaaacaatacgccaaagc

SEQ ID NO: 58147 - DNA, 20 bp, Streptococcus pyogenes
tcaaacaatacgccaaagcc

SEQ ID NO: 58148 - DNA, 20 bp, Streptococcus pyogenes
caagcgtttgataaactctt

SEQ ID NO: 58149 - DNA, 20 bp, Streptococcus pyogenes
aagcgtttgataaactcttt

SEQ ID NO: 58150 - DNA, 20 bp, Streptococcus pyogenes
aagaaaggctcaatgacaat

SEQ ID NO: 58151 - DNA, 20 bp, Streptococcus pyogenes
ggcaaaatcaaaccctgcta

SEQ ID NO: 58152 - DNA, 20 bp, Streptococcus pyogenes
gcaaaatcaaaccctgctat

SEQ ID NO: 58153 - DNA, 20 bp, Streptococcus pyogenes
tggcaagatatccaaaaaga

SEQ ID NO: 58154 - DNA, 20 bp, Streptococcus pyogenes
ttggatatcttgccataact

SEQ ID NO: 58155 - DNA, 20 bp, Streptococcus pyogenes
tgccatgaataaactcaaat

SEQ ID NO: 58156 - DNA, 20 bp, Streptococcus pyogenes
gaacgggagttagttcaatt

SEQ ID NO: 58157 - DNA, 20 bp, Streptococcus pyogenes
aacgggagttagttcaattc

SEQ ID NO: 58158 - DNA, 20 bp, Streptococcus pyogenes
gttcaattcattagagatca

SEQ ID NO: 58159 - DNA, 20 bp, Streptococcus pyogenes
aattcattagagatcaaatc

SEQ ID NO: 58160 - DNA, 20 bp, Streptococcus pyogenes
aaattccctccctccctgaa

SEQ ID NO: 58161 - DNA, 20 bp, Streptococcus pyogenes
cctccctccctgaacaagaa

SEQ ID NO: 58162 - DNA, 20 bp, Streptococcus pyogenes
gcgaacttttccaaatggtt

SEQ ID NO: 58163 - DNA, 20 bp, Streptococcus pyogenes
tccaaatggttgatcaattg

SEQ ID NO: 58164 - DNA, 20 bp, Streptococcus pyogenes
ccaaatggttgatcaattga

SEQ ID NO: 58165 - DNA, 20 bp, Streptococcus pyogenes
ctcagcagcatctgccatgt

SEQ ID NO: 58166 - DNA, 20 bp, Streptococcus pyogenes
tgagcgcatcatgtccttgc

SEQ ID NO: 58167 - DNA, 20 bp, Streptococcus pyogenes
cccataaagccaagatcttt

SEQ ID NO: 58168 - DNA, 20 bp, Streptococcus pyogenes
gttgaaaccgtctgttccaa

SEQ ID NO: 58169 - DNA, 20 bp, Streptococcus pyogenes
ttgaaaccgtctgttccaac

SEQ ID NO: 58170 - DNA, 20 bp, Streptococcus pyogenes
agccagattcaatcataatg

SEQ ID NO: 58171 - DNA, 20 bp, Streptococcus pyogenes
aatcataatggtatcgttgt

SEQ ID NO: 58172 - DNA, 20 bp, Streptococcus pyogenes
tcttgtaccaattcagctgc

SEQ ID NO: 58173 - DNA, 20 bp, Streptococcus pyogenes
taccaattcagctgcttttt

SEQ ID NO: 58174 - DNA, 20 bp, Streptococcus pyogenes
agctgctttttctgcaatcc

SEQ ID NO: 58175 - DNA, 20 bp, Streptococcus pyogenes
ttttcaacatccaacatttt

SEQ ID NO: 58176 - DNA, 20 bp, Streptococcus pyogenes
tcaacatccaacattttagt

SEQ ID NO: 58177 - DNA, 20 bp, Streptococcus pyogenes
caacatccaacattttagta

SEQ ID NO: 58178 - DNA, 20 bp, Streptococcus pyogenes
aacatccaacattttagtat

SEQ ID NO: 58179 - DNA, 20 bp, Streptococcus pyogenes
tagtattcatgacggtcctg

SEQ ID NO: 58180 - DNA, 20 bp, Streptococcus pyogenes
gccctgttaaaagcagccaa

SEQ ID NO: 58181 - DNA, 20 bp, Streptococcus pyogenes
aaagcagccaaagcagcagg

SEQ ID NO: 58182 - DNA, 20 bp, Streptococcus pyogenes
acaccgcaattgaaaccacc

SEQ ID NO: 58183 - DNA, 20 bp, Streptococcus pyogenes
aaaccaccgcctttgccaaa

SEQ ID NO: 58184 - DNA, 20 bp, Streptococcus pyogenes
gccaaacacgagcaatttgt

SEQ ID NO: 58185 - DNA, 20 bp, Streptococcus pyogenes
cctttccatcaatttggaga

SEQ ID NO: 58186 - DNA, 20 bp, Streptococcus pyogenes
ccatcaatttggagaaaaca

SEQ ID NO: 58187 - DNA, 20 bp, Streptococcus pyogenes
catcaatttggagaaaacaa

SEQ ID NO: 58188 - DNA, 20 bp, Streptococcus pyogenes
ggagaaaacaagtacaaact

SEQ ID NO: 58189 - DNA, 20 bp, Streptococcus pyogenes
gagaaaacaagtacaaactt

SEQ ID NO: 58190 - DNA, 20 bp, Streptococcus pyogenes
ccaacgttgtttacgatttg

SEQ ID NO: 58191 - DNA, 20 bp, Streptococcus pyogenes
caacgttgtttacgatttgg

SEQ ID NO: 58192 - DNA, 20 bp, Streptococcus pyogenes
tttacgatttggccatgttg

SEQ ID NO: 58193 - DNA, 20 bp, Streptococcus pyogenes
acgatttggccatgttgtgt

SEQ ID NO: 58194 - DNA, 20 bp, Streptococcus pyogenes
cgatttggccatgttgtgtc

SEQ ID NO: 58195 - DNA, 20 bp, Streptococcus pyogenes
tgatagtgattgcgaagctt

SEQ ID NO: 58196 - DNA, 20 bp, Streptococcus pyogenes
gatagtgattgcgaagcttc

SEQ ID NO: 58197 - DNA, 20 bp, Streptococcus pyogenes
atagtgattgcgaagcttct

SEQ ID NO: 58198 - DNA, 20 bp, Streptococcus pyogenes
cgaagcttcttgtgctgatt

SEQ ID NO: 58199 - DNA, 20 bp, Streptococcus pyogenes
ttgtgctgattttcttaaac

SEQ ID NO: 58200 - DNA, 20 bp, Streptococcus pyogenes
actaataacaacatctggcg

SEQ ID NO: 58201 - DNA, 20 bp, Streptococcus pyogenes
aagttggtttctgtcgtccc

SEQ ID NO: 58202 - DNA, 20 bp, Streptococcus pyogenes
gtttctgtcgtccctgtttt

SEQ ID NO: 58203 - DNA, 20 bp, Streptococcus pyogenes
ctgtcgtccctgttttacca

SEQ ID NO: 58204 - DNA, 20 bp, Streptococcus pyogenes
tgtcgtccctgttttaccag

SEQ ID NO: 58205 - DNA, 20 bp, Streptococcus pyogenes
gttgtcacgctgccacctaa

SEQ ID NO: 58206 - DNA, 20 bp, Streptococcus pyogenes
tcacgctgccacctaaagct

SEQ ID NO: 58207 - DNA, 20 bp, Streptococcus pyogenes
tttggcagagctcatatcta

SEQ ID NO: 58208 - DNA, 20 bp, Streptococcus pyogenes
ttggcagagctcatatctaa

SEQ ID NO: 58209 - DNA, 20 bp, Streptococcus pyogenes
gatatgagctctgccaaaaa

SEQ ID NO: 58210 - DNA, 20 bp, Streptococcus pyogenes
ttgatgcgggactacgtttt

SEQ ID NO: 58211 - DNA, 20 bp, Streptococcus pyogenes
atgcgggactacgttttgct

SEQ ID NO: 58212 - DNA, 20 bp, Streptococcus pyogenes
tgcttgagtcgcatagttaa

SEQ ID NO: 58213 - DNA, 20 bp, Streptococcus pyogenes
gcttgagtcgcatagttaaa

SEQ ID NO: 58214 - DNA, 20 bp, Streptococcus pyogenes
cttgagtcgcatagttaaaa

SEQ ID NO: 58215 - DNA, 20 bp, Hepatitis E virus
atactgctagagaggcccag

SEQ ID NO: 58216 - DNA, 20 bp, Hepatitis E virus
gctaatgctcaggtggtacg

SEQ ID NO: 58217 - DNA, 20 bp, Hepatitis E virus
ctaatgctcaggtggtacgc

SEQ ID NO: 58218 - DNA, 20 bp, Hepatitis E virus
agagtgcgacaggtaggggc

SEQ ID NO: 58219 - DNA, 20 bp, Hepatitis E virus
gcaaaggcggtagccgccgc

SEQ ID NO: 58220 - DNA, 20 bp, Hepatitis E virus
cccgcggcgcgggccggcca

SEQ ID NO: 58221 - DNA, 20 bp, Hepatitis E virus
cattcttgcagggcgccctg

SEQ ID NO: 58222 - DNA, 20 bp, Hepatitis E virus
ttgcagggcgccctgctact

SEQ ID NO: 58223 - DNA, 20 bp, Hepatitis E virus
cagggcgccctgctactgat

SEQ ID NO: 58224 - DNA, 20 bp, Hepatitis E virus
ccttttgcacgcgtgggttc

SEQ ID NO: 58225 - DNA, 20 bp, Hepatitis E virus
gctgtgatgcatctgcccgc

SEQ ID NO: 58226 - DNA, 20 bp, Hepatitis E virus
ctgtgatgcatctgcccgct

SEQ ID NO: 58227 - DNA, 20 bp, Hepatitis E virus
ttgccggacggggtttatac

SEQ ID NO: 58228 - DNA, 20 bp, Hepatitis E virus
ccggacggggtttataccac

SEQ ID NO: 58229 - DNA, 20 bp, Hepatitis E virus
ataccacccgcgcttataca

SEQ ID NO: 58230 - DNA, 20 bp, Hepatitis E virus
tgtgctgcggttgaccaccg

SEQ ID NO: 58231 - DNA, 20 bp, Hepatitis E virus
gtgctgcggttgaccaccgt

SEQ ID NO: 58232 - DNA, 20 bp, Hepatitis E virus
tgctgcggttgaccaccgtg

SEQ ID NO: 58233 - DNA, 20 bp, Hepatitis E virus
accaccgtggcaaatccttg

SEQ ID NO: 58234 - DNA, 20 bp, Hepatitis E virus
ccccatgccctacacccctt

SEQ ID NO: 58235 - DNA, 20 bp, Hepatitis E virus
ccaatgagggttggaccacc

SEQ ID NO: 58236 - DNA, 20 bp, Hepatitis E virus
gaccaccgatgagtacgccc

SEQ ID NO: 58237 - DNA, 20 bp, Hepatitis E virus
tggcctcctatttgacaata

SEQ ID NO: 58238 - DNA, 20 bp, Hepatitis E virus
gacaatatgccaccaacgct

SEQ ID NO: 58239 - DNA, 20 bp, Hepatitis E virus
acaatatgccaccaacgctg

SEQ ID NO: 58240 - DNA, 20 bp, Hepatitis E virus
tatagacagtgtcgggattg

SEQ ID NO: 58241 - DNA, 20 bp, Hepatitis E virus
ggtgtcagcaggtttttatg

SEQ ID NO: 58242 - DNA, 20 bp, Hepatitis E virus
ttatgtggatcttagagagc

SEQ ID NO: 58243 - DNA, 20 bp, Hepatitis E virus
tatgtggatcttagagagct

SEQ ID NO: 58244 - DNA, 20 bp, Hepatitis E virus
atgtggatcttagagagctt

SEQ ID NO: 58245 - DNA, 20 bp, Hepatitis E virus
acgagcccaccggcttggat

SEQ ID NO: 58246 - DNA, 20 bp, Hepatitis E virus
cgagcccaccggcttggata

SEQ ID NO: 58247 - DNA, 20 bp, Hepatitis E virus
gataattggaccatccgcgc

SEQ ID NO: 58248 - DNA, 20 bp, Hepatitis E virus
gaccatccgcgctctcacgg

SEQ ID NO: 58249 - DNA, 20 bp, Hepatitis E virus
catcaggcctctctgcgcgc

SEQ ID NO: 58250 - DNA, 20 bp, Hepatitis E virus
gacaccggggccgatttccc

SEQ ID NO: 58251 - DNA, 20 bp, Hepatitis E virus
ccccgaggtacgttctccct

SEQ ID NO: 58252 - DNA, 20 bp, Hepatitis E virus
cccgaggtacgttctcccta

SEQ ID NO: 58253 - DNA, 20 bp, Hepatitis E virus
tccctacacctgttacgtac

SEQ ID NO: 58254 - DNA, 20 bp, Hepatitis E virus
cgtaccgcgggcaccccccc

SEQ ID NO: 58255 - DNA, 20 bp, Hepatitis E virus
ctggaattgctcccggatgg

SEQ ID NO: 58256 - DNA, 20 bp, Hepatitis E virus
ctcccggatggggcggcagt

SEQ ID NO: 58257 - DNA, 20 bp, Hepatitis E virus
atgagggggatctttttaat

SEQ ID NO: 58258 - DNA, 20 bp, Hepatitis E virus
tgagggggatctttttaatt

SEQ ID NO: 58259 - DNA, 20 bp, Hepatitis E virus
ttaattcggattgcttctgg

SEQ ID NO: 58260 - DNA, 20 bp, Hepatitis E virus
caggtggcctatcaggagtg

SEQ ID NO: 58261 - DNA, 20 bp, Hepatitis E virus
ttgcctactcggcagtggaa

SEQ ID NO: 58262 - DNA, 20 bp, Hepatitis E virus
cctactcggcagtggaatat

SEQ ID NO: 58263 - DNA, 20 bp, Hepatitis E virus
cactgccgagtaggcaataa

SEQ ID NO: 58264 - DNA, 20 bp, Hepatitis E virus
ttccaacaaaccaacttaag

SEQ ID NO: 58265 - DNA, 20 bp, Hepatitis E virus
caacaaaccaacttaaggcg

SEQ ID NO: 58266 - DNA, 20 bp, Hepatitis E virus
aggcgcaatggagggctcga

SEQ ID NO: 58267 - DNA, 20 bp, Hepatitis E virus
ccctgttatgaccccgcatg

SEQ ID NO: 58268 - DNA, 20 bp, Hepatitis E virus
cctgttatgaccccgcatgt

SEQ ID NO: 58269 - DNA, 20 bp, Hepatitis E virus
atctggagccaacagaatgg

SEQ ID NO: 58270 - DNA, 20 bp, Hepatitis E virus
gttggcggccgattaccccg

SEQ ID NO: 58271 - DNA, 20 bp, Hepatitis E virus
ttggcggccgattaccccgg

SEQ ID NO: 58272 - DNA, 20 bp, Hepatitis E virus
tgttggctccagattaagct

SEQ ID NO: 58273 - DNA, 20 bp, Hepatitis E virus
gctccagattaagctgcata

SEQ ID NO: 58274 - DNA, 20 bp, Hepatitis E virus
acatcagatggccgaagcat

SEQ ID NO: 58275 - DNA, 20 bp, Hepatitis E virus
catcagatggccgaagcatt

SEQ ID NO: 58276 - DNA, 20 bp, Hepatitis E virus
ggccacaggccactcgaggt

SEQ ID NO: 58277 - DNA, 20 bp, Hepatitis E virus
ggccatctgatgtaaagcca

SEQ ID NO: 58278 - DNA, 20 bp, Hepatitis E virus
tggcatgatgacgtggaagt

SEQ ID NO: 58279 - DNA, 20 bp, Hepatitis E virus
attccttcgttgcaaggtgt

SEQ ID NO: 58280 - DNA, 20 bp, Hepatitis E virus
cttcgttgcaaggtgtcaga

SEQ ID NO: 58281 - DNA, 20 bp, Hepatitis E virus
gttgcaaggtgtcagagttt

SEQ ID NO: 58282 - DNA, 20 bp, Hepatitis E virus
caaggtgtcagagtttcatc

SEQ ID NO: 58283 - DNA, 20 bp, Hepatitis E virus
taccacctgctccgttcggg

SEQ ID NO: 58284 - DNA, 20 bp, Hepatitis E virus
ggggtgggtgttgcaggctc

SEQ ID NO: 58285 - DNA, 20 bp, Hepatitis E virus
caggctccccaagagagctt

SEQ ID NO: 58286 - DNA, 20 bp, Hepatitis E virus
cggggtcgatggaagaagca

SEQ ID NO: 58287 - DNA, 20 bp, Hepatitis E virus
ttccatcgaccccgcaagct

SEQ ID NO: 58288 - DNA, 20 bp, Hepatitis E virus
aaggttaactttagtgatgt

SEQ ID NO: 58289 - DNA, 20 bp, Hepatitis E virus
actttagtgatgttggctcg

SEQ ID NO: 58290 - DNA, 20 bp, Hepatitis E virus
agtgatgttggctcgtacgc

SEQ ID NO: 58291 - DNA, 20 bp, Hepatitis E virus
gtgatgttggctcgtacgca

SEQ ID NO: 58292 - DNA, 20 bp, Hepatitis E virus
gctcgtacgcaggcttgcta

SEQ ID NO: 58293 - DNA, 20 bp, Hepatitis E virus
tacaagctggagcctggtct

SEQ ID NO: 58294 - DNA, 20 bp, Hepatitis E virus
gaaagcgatcgctgagggcc

SEQ ID NO: 58295 - DNA, 20 bp, Hepatitis E virus
aaagcgatcgctgagggccg

SEQ ID NO: 58296 - DNA, 20 bp, Hepatitis E virus
caaacctgcgaccgcattga

SEQ ID NO: 58297 - DNA, 20 bp, Hepatitis E virus
aaacctgcgaccgcattgag

SEQ ID NO: 58298 - DNA, 20 bp, Hepatitis E virus
gctatccccaaccaatccct

SEQ ID NO: 58299 - DNA, 20 bp, Hepatitis E virus
gctgccgaactctccaccat

SEQ ID NO: 58300 - DNA, 20 bp, Hepatitis E virus
ctgccgaactctccaccatg

SEQ ID NO: 58301 - DNA, 20 bp, Hepatitis E virus
gcaccgcctgggtcgatcgg

SEQ ID NO: 58302 - DNA, 20 bp, Hepatitis E virus
cggggcctgccgcggcgccg

SEQ ID NO: 58303 - DNA, 20 bp, Hepatitis E virus
tggccccaatccacaacagt

SEQ ID NO: 58304 - DNA, 20 bp, Hepatitis E virus
catcacttccaccgacgtgc

SEQ ID NO: 58305 - DNA, 20 bp, Hepatitis E virus
caccgacgtgcgcattgtgg

SEQ ID NO: 58306 - DNA, 20 bp, Hepatitis E virus
tggcgcagcctggcctggcc

SEQ ID NO: 58307 - DNA, 20 bp, Hepatitis E virus
atatccaccgacgtggggac

SEQ ID NO: 58308 - DNA, 20 bp, Hepatitis E virus
ggtttacttgacatcgccct

SEQ ID NO: 58309 - DNA, 20 bp, Hepatitis E virus
acttgacatcgccctccagg

SEQ ID NO: 58310 - DNA, 20 bp, Hepatitis E virus
cttgacatcgccctccaggt

SEQ ID NO: 58311 - DNA, 20 bp, Hepatitis E virus
acatcgccctccaggttgaa

SEQ ID NO: 58312 - DNA, 20 bp, Hepatitis E virus
aatatcgcaatttgacccct

SEQ ID NO: 58313 - DNA, 20 bp, Hepatitis E virus
tgtgggtgaccttgccctct

SEQ ID NO: 58314 - DNA, 20 bp, Hepatitis E virus
ccctctgcagagtatgccca

SEQ ID NO: 58315 - DNA, 20 bp, Hepatitis E virus
ccacccggcatactggtctg

SEQ ID NO: 58316 - DNA, 20 bp, Hepatitis E virus
gcagcagggcacaaccaagg

SEQ ID NO: 58317 - DNA, 20 bp, Hepatitis E virus
caacaccactgactctgata

SEQ ID NO: 58318 - DNA, 20 bp, Hepatitis E virus
agaggtcccatcccaccaga

SEQ ID NO: 58319 - DNA, 20 bp, Hepatitis E virus
gaggtcccatcccaccagac

SEQ ID NO: 58320 - DNA, 20 bp, Hepatitis E virus
taattatatgtgtagccggc

SEQ ID NO: 58321 - DNA, 20 bp, Human coronavirus
gttatggcagtcctagtgta

SEQ ID NO: 58322 - DNA, 20 bp, Human coronavirus
ttatggcagtcctagtgtaa

SEQ ID NO: 58323 - DNA, 20 bp, Human coronavirus
tggcagtcctagtgtaattg

SEQ ID NO: 58324 - DNA, 20 bp, Human coronavirus
aaatttcgtcaagtttgtaa

SEQ ID NO: 58325 - DNA, 20 bp, Human coronavirus
cgtcaagtttgtaaactggt

SEQ ID NO: 58326 - DNA, 20 bp, Human coronavirus
tcaggcatgccgttttgttg

SEQ ID NO: 58327 - DNA, 20 bp, Human coronavirus
caggcatgccgttttgttgc

SEQ ID NO: 58328 - DNA, 20 bp, Human coronavirus
aggcatgccgttttgttgct

SEQ ID NO: 58329 - DNA, 20 bp, Human coronavirus
tgttgcttttggcttacagg

SEQ ID NO: 58330 - DNA, 20 bp, Human coronavirus
gttgcttttggcttacagga

SEQ ID NO: 58331 - DNA, 20 bp, Human coronavirus
ttaaaccagttttctttaat

SEQ ID NO: 58332 - DNA, 20 bp, Human coronavirus
aaccagttttctttaatgct

SEQ ID NO: 58333 - DNA, 20 bp, Human coronavirus
tctttaatgcttttgttaaa

SEQ ID NO: 58334 - DNA, 20 bp, Human coronavirus
ctttaatgcttttgttaaat

SEQ ID NO: 58335 - DNA, 20 bp, Human coronavirus
tttaatgcttttgttaaatg

SEQ ID NO: 58336 - DNA, 20 bp, Human coronavirus
tcttggtgcttctgttacag

SEQ ID NO: 58337 - DNA, 20 bp, Human coronavirus
cttggtgcttctgttacaga

SEQ ID NO: 58338 - DNA, 20 bp, Human coronavirus
ttggtgcttctgttacagaa

SEQ ID NO: 58339 - DNA, 20 bp, Human coronavirus
gtgcttctgttacagaagat

SEQ ID NO: 58340 - DNA, 20 bp, Human coronavirus
tgttacagaagatgttaaat

SEQ ID NO: 58341 - DNA, 20 bp, Human coronavirus
gcgtcttgttgattgtgcac

SEQ ID NO: 58342 - DNA, 20 bp, Human coronavirus
cgtcttgttgattgtgcacc

SEQ ID NO: 58343 - DNA, 20 bp, Human coronavirus
ttgattgtgcacctgtagtt

SEQ ID NO: 58344 - DNA, 20 bp, Human coronavirus
attgtgcacctgtagtttgc

SEQ ID NO: 58345 - DNA, 20 bp, Human coronavirus
tgcacctgtagtttgcccta

SEQ ID NO: 58346 - DNA, 20 bp, Human coronavirus
ttagacgtgatgctacattc

SEQ ID NO: 58347 - DNA, 20 bp, Human coronavirus
gacgtgatgctacattcgct

SEQ ID NO: 58348 - DNA, 20 bp, Human coronavirus
gctacacatgtgtgttttaa

SEQ ID NO: 58349 - DNA, 20 bp, Human coronavirus
taaggactgttataatgttt

SEQ ID NO: 58350 - DNA, 20 bp, Human coronavirus
aaggactgttataatgtttg

SEQ ID NO: 58351 - DNA, 20 bp, Human coronavirus
tgccaaacgttttagacgtg

SEQ ID NO: 58352 - DNA, 20 bp, Human coronavirus
tagacgtgttttggtaaaat

SEQ ID NO: 58353 - DNA, 20 bp, Human coronavirus
agacgtgttttggtaaaatt

SEQ ID NO: 58354 - DNA, 20 bp, Human coronavirus
gacgtgttttggtaaaattg

SEQ ID NO: 58355 - DNA, 20 bp, Human coronavirus
tggtaaaattgcttgatgtc

SEQ ID NO: 58356 - DNA, 20 bp, Human coronavirus
ggaaggtctacatgaagttc

SEQ ID NO: 58357 - DNA, 20 bp, Human coronavirus
ttacatctgcaatgaatgtc

SEQ ID NO: 58358 - DNA, 20 bp, Human coronavirus
catctgcaatgaatgtcatt

SEQ ID NO: 58359 - DNA, 20 bp, Human coronavirus
ggcaacatattaagttgcca

SEQ ID NO: 58360 - DNA, 20 bp, Human coronavirus
agttgccacaattttatatt

SEQ ID NO: 58361 - DNA, 20 bp, Human coronavirus
gttgtttgttttggattatg

SEQ ID NO: 58362 - DNA, 20 bp, Human coronavirus
tttgttttggattatgcctt

SEQ ID NO: 58363 - DNA, 20 bp, Human coronavirus
gttttggattatgccttaca

SEQ ID NO: 58364 - DNA, 20 bp, Human coronavirus
ttttggattatgccttacac

SEQ ID NO: 58365 - DNA, 20 bp, Human coronavirus
tggattatgccttacacaaa

SEQ ID NO: 58366 - DNA, 20 bp, Human coronavirus
tgctgtatataaaaatgtta

SEQ ID NO: 58367 - DNA, 20 bp, Human coronavirus
gctgtatataaaaatgttaa

SEQ ID NO: 58368 - DNA, 20 bp, Human coronavirus
ctgtatataaaaatgttaaa

SEQ ID NO: 58369 - DNA, 20 bp, Human coronavirus
aattttatttaggtgatatt

SEQ ID NO: 58370 - DNA, 20 bp, Human coronavirus
tatttaggtgatatttcaca

SEQ ID NO: 58371 - DNA, 20 bp, Human coronavirus
atatgtgtgttgtaccatcg

SEQ ID NO: 58372 - DNA, 20 bp, Human coronavirus
tatgtgtgttgtaccatcga

SEQ ID NO: 58373 - DNA, 20 bp, Human coronavirus
taccatcgataaatgatctt

SEQ ID NO: 58374 - DNA, 20 bp, Human coronavirus
cttttgataaaaatcttggt

SEQ ID NO: 58375 - DNA, 20 bp, Human coronavirus
ttttgataaaaatcttggtc

SEQ ID NO: 58376 - DNA, 20 bp, Human coronavirus
actcttttgaaggtgtttta

SEQ ID NO: 58377 - DNA, 20 bp, Human coronavirus
tgaaggtgttttacctatta

SEQ ID NO: 58378 - DNA, 20 bp, Human coronavirus
gaaggtgttttacctattaa

SEQ ID NO: 58379 - DNA, 20 bp, Human coronavirus
aaggtgttttacctattaat

SEQ ID NO: 58380 - DNA, 20 bp, Human coronavirus
tacctattaatactgatact

SEQ ID NO: 58381 - DNA, 20 bp, Human coronavirus
aaagtgctattgtctgtgct

SEQ ID NO: 58382 - DNA, 20 bp, Human coronavirus
tctgtgctagtgtgcttaaa

SEQ ID NO: 58383 - DNA, 20 bp, Human coronavirus
aagatggttgtgatgttggt

SEQ ID NO: 58384 - DNA, 20 bp, Human coronavirus
tgatgttggtttttgtccac

SEQ ID NO: 58385 - DNA, 20 bp, Human coronavirus
gtttttgtccacacagacat

SEQ ID NO: 58386 - DNA, 20 bp, Human coronavirus
gtaatgtttttgataatttt

SEQ ID NO: 58387 - DNA, 20 bp, Human coronavirus
ttgataattttaatcaatgg

SEQ ID NO: 58388 - DNA, 20 bp, Human coronavirus
tgataattttaatcaatggc

SEQ ID NO: 58389 - DNA, 20 bp, Human coronavirus
gataattttaatcaatggca

SEQ ID NO: 58390 - DNA, 20 bp, Human coronavirus
ataattttaatcaatggcat

SEQ ID NO: 58391 - DNA, 20 bp, Human coronavirus
gttttggttttgataaatgg

SEQ ID NO: 58392 - DNA, 20 bp, Human coronavirus
ttttggttttgataaatggt

SEQ ID NO: 58393 - DNA, 20 bp, Human coronavirus
tggttttgataaatggtatg

SEQ ID NO: 58394 - DNA, 20 bp, Human coronavirus
ggttttgataaatggtatgt

SEQ ID NO: 58395 - DNA, 20 bp, Human coronavirus
gttttgataaatggtatgtt

SEQ ID NO: 58396 - DNA, 20 bp, Human coronavirus
tcgttgtgcttgttatgctc

SEQ ID NO: 58397 - DNA, 20 bp, Human coronavirus
tgcttgttatgctcatttag

SEQ ID NO: 58398 - DNA, 20 bp, Human coronavirus
ttatgctcatttagccaagg

SEQ ID NO: 58399 - DNA, 20 bp, Human coronavirus
tgctcatttagccaaggcta

SEQ ID NO: 58400 - DNA, 20 bp, Human coronavirus
agccaaggctatgttagatt

SEQ ID NO: 58401 - DNA, 20 bp, Human coronavirus
gcataatttttcagtgtctc

SEQ ID NO: 58402 - DNA, 20 bp, Human coronavirus
cataatttttcagtgtctca

SEQ ID NO: 58403 - DNA, 20 bp, Human coronavirus
ttcagtgtctcataatggtg

SEQ ID NO: 58404 - DNA, 20 bp, Human coronavirus
tcagtgtctcataatggtgt

SEQ ID NO: 58405 - DNA, 20 bp, Human coronavirus
cagtgtctcataatggtgtc

SEQ ID NO: 58406 - DNA, 20 bp, Human coronavirus
gttctgattttactggtagt

SEQ ID NO: 58407 - DNA, 20 bp, Human coronavirus
tgattttactggtagtgttt

SEQ ID NO: 58408 - DNA, 20 bp, Human coronavirus
tactggtagtgtttatggta

SEQ ID NO: 58409 - DNA, 20 bp, Human coronavirus
actggtagtgtttatggtaa

SEQ ID NO: 58410 - DNA, 20 bp, Human coronavirus
ctggtagtgtttatggtaat

SEQ ID NO: 58411 - DNA, 20 bp, Human coronavirus
atgattttaaggtgagtgct

SEQ ID NO: 58412 - DNA, 20 bp, Human coronavirus
tgattttaaggtgagtgctg

SEQ ID NO: 58413 - DNA, 20 bp, Human coronavirus
taaggtgagtgctgctgaat

SEQ ID NO: 58414 - DNA, 20 bp, Human coronavirus
aaggtgagtgctgctgaatt

SEQ ID NO: 58415 - DNA, 20 bp, Human coronavirus
aggtgagtgctgctgaattt

SEQ ID NO: 58416 - DNA, 20 bp, Human coronavirus
tgaggatgctattgctaatg

SEQ ID NO: 58417 - DNA, 20 bp, Human coronavirus
ctaatggatcttcttctcaa

SEQ ID NO: 58418 - DNA, 20 bp, Human coronavirus
ttctcaacttattaaacaat

SEQ ID NO: 58419 - DNA, 20 bp, Human coronavirus
tcaacttattaaacaattga

SEQ ID NO: 58420 - DNA, 20 bp, Human coronavirus
ttaaacaattgaagcgtgcc

SEQ ID NO: 58421 - DNA, 20 bp, Human coronavirus
tttggacacttaatgatgtt

SEQ ID NO: 58422 - DNA, 20 bp, Human coronavirus
ggacacttaatgatgttaaa

SEQ ID NO: 58423 - DNA, 20 bp, Human coronavirus
gacacttaatgatgttaaag

SEQ ID NO: 58424 - DNA, 20 bp, Human coronavirus
atgatgttaaagacaatgat

SEQ ID NO: 58425 - DNA, 20 bp, Human coronavirus
aagacaatgatggtagacct

SEQ ID NO: 58426 - DNA, 20 bp, Human coronavirus
gtctacaagctggtaaacaa

SEQ ID NO: 58427 - DNA, 20 bp, Human coronavirus
gctgttaattctggactttt

SEQ ID NO: 58428 - DNA, 20 bp, Human coronavirus
attctggacttttaactgct

SEQ ID NO: 58429 - DNA, 20 bp, Human coronavirus
tggacttttaactgcttgtg

SEQ ID NO: 58430 - DNA, 20 bp, Human coronavirus
taactgcttgtgctttttct

SEQ ID NO: 58431 - DNA, 20 bp, Human coronavirus
ctattggttgtttggatcct

SEQ ID NO: 58432 - DNA, 20 bp, Human coronavirus
gttgtttggatcctattagg

SEQ ID NO: 58433 - DNA, 20 bp, Human coronavirus
tttggatcctattaggtttt

SEQ ID NO: 58434 - DNA, 20 bp, Human coronavirus
ggatcctattaggttttgtt

SEQ ID NO: 58435 - DNA, 20 bp, Human coronavirus
gatcctattaggttttgttt

SEQ ID NO: 58436 - DNA, 20 bp, Human coronavirus
tggaacacgagcaatccatg

SEQ ID NO: 58437 - DNA, 20 bp, Human coronavirus
acttttctggtgctttggct

SEQ ID NO: 58438 - DNA, 20 bp, Human coronavirus
tctggtgctttggctgagca

SEQ ID NO: 58439 - DNA, 20 bp, Human coronavirus
ctggtgctttggctgagcat

SEQ ID NO: 58440 - DNA, 20 bp, Human coronavirus
tggtgctttggctgagcatg

SEQ ID NO: 58441 - DNA, 20 bp, Human coronavirus
atgcatctcttggcaaaatt

SEQ ID NO: 58442 - DNA, 20 bp, Human coronavirus
tgcatctcttggcaaaattg

SEQ ID NO: 58443 - DNA, 20 bp, Human coronavirus
gcaaaattgtagctagagct

SEQ ID NO: 58444 - DNA, 20 bp, Human coronavirus
tagctagagctatgcttaaa

SEQ ID NO: 58445 - DNA, 20 bp, Human coronavirus
aatgcgttgctctatgcgat

SEQ ID NO: 58446 - DNA, 20 bp, Human coronavirus
tcattttaagcaattaggtt

SEQ ID NO: 58447 - DNA, 20 bp, Human coronavirus
taagcaattaggtttggttt

SEQ ID NO: 58448 - DNA, 20 bp, Human coronavirus
aagcaattaggtttggtttg

SEQ ID NO: 58449 - DNA, 20 bp, Human coronavirus
agcaattaggtttggtttgg

SEQ ID NO: 58450 - DNA, 20 bp, Human coronavirus
ggtttggtttggaataaaga

SEQ ID NO: 58451 - DNA, 20 bp, Human coronavirus
agtatgctattagtggtaaa

SEQ ID NO: 58452 - DNA, 20 bp, Human coronavirus
gtggtaaagaacgtgctaga

SEQ ID NO: 58453 - DNA, 20 bp, Human coronavirus
gtggtgtttctctgttgtct

SEQ ID NO: 58454 - DNA, 20 bp, Human coronavirus
ctctgttgtctacaatgacc

SEQ ID NO: 58455 - DNA, 20 bp, Human coronavirus
tctgttgtctacaatgacca

SEQ ID NO: 58456 - DNA, 20 bp, Human coronavirus
cagccatggtgttgggctct

SEQ ID NO: 58457 - DNA, 20 bp, Human coronavirus
agccatggtgttgggctcta

SEQ ID NO: 58458 - DNA, 20 bp, Human coronavirus
ggctctaagcatgttaattg

SEQ ID NO: 58459 - DNA, 20 bp, Human coronavirus
attgttgtactgcaacagat

SEQ ID NO: 58460 - DNA, 20 bp, Human coronavirus
ttgtactgcaacagataggt

SEQ ID NO: 58461 - DNA, 20 bp, Human coronavirus
tgttcccagcatactatgca

SEQ ID NO: 58462 - DNA, 20 bp, Human coronavirus
gttcccagcatactatgcaa

SEQ ID NO: 58463 - DNA, 20 bp, Human coronavirus
ttcccagcatactatgcaaa

SEQ ID NO: 58464 - DNA, 20 bp, Human coronavirus
ccagcatactatgcaaatag

SEQ ID NO: 58465 - DNA, 20 bp, Human coronavirus
acaaagatggtacctattat

SEQ ID NO: 58466 - DNA, 20 bp, Human coronavirus
ttatgctagtatgtatgaaa

SEQ ID NO: 58467 - DNA, 20 bp, Human coronavirus
tatgctagtatgtatgaaaa

SEQ ID NO: 58468 - DNA, 20 bp, Human coronavirus
atgctagtatgtatgaaaat

SEQ ID NO: 58469 - DNA, 20 bp, Human coronavirus
tgctagtatgtatgaaaatt

SEQ ID NO: 58470 - DNA, 20 bp, Human coronavirus
tacaatattgcaagctgctg

SEQ ID NO: 58471 - DNA, 20 bp, Human coronavirus
acgtgcaccaactattgcaa

SEQ ID NO: 58472 - DNA, 20 bp, Human coronavirus
cgtgcaccaactattgcaaa

SEQ ID NO: 58473 - DNA, 20 bp, Human coronavirus
caaaccaagagaagtattct

SEQ ID NO: 58474 - DNA, 20 bp, Human coronavirus
tagcatttataaattgcacc

SEQ ID NO: 58475 - DNA, 20 bp, Human coronavirus
ataaattgcaccctgctttt

SEQ ID NO: 58476 - DNA, 20 bp, Human coronavirus
gttgggtatggatgttgaaa

SEQ ID NO: 58477 - DNA, 20 bp, Human coronavirus
ggtatggatgttgaaagtgc

SEQ ID NO: 58478 - DNA, 20 bp, Human coronavirus
aaagtgctcatgtttgtggc

SEQ ID NO: 58479 - DNA, 20 bp, Human coronavirus
gtggcgataacataggtact

SEQ ID NO: 58480 - DNA, 20 bp, Human coronavirus
tggcgataacataggtacta

SEQ ID NO: 58481 - DNA, 20 bp, Human coronavirus
tgatatacaacagtggggtt

SEQ ID NO: 58482 - DNA, 20 bp, Human coronavirus
gatatacaacagtggggtta

SEQ ID NO: 58483 - DNA, 20 bp, Human coronavirus
atatacaacagtggggttat

SEQ ID NO: 58484 - DNA, 20 bp, Human coronavirus
tgttggttccttgagccaaa

SEQ ID NO: 58485 - DNA, 20 bp, Human coronavirus
gttccttgagccaaaaccac

SEQ ID NO: 58486 - DNA, 20 bp, Human coronavirus
tgacaagcaacctgttaata

SEQ ID NO: 58487 - DNA, 20 bp, Human coronavirus
atagtaatgtcaagttgttg

SEQ ID NO: 58488 - DNA, 20 bp, Human coronavirus
ttggattatgattatgcaac

SEQ ID NO: 58489 - DNA, 20 bp, Human coronavirus
gattatgattatgcaaccca

SEQ ID NO: 58490 - DNA, 20 bp, Human coronavirus
tgattatgcaacccatggtc

SEQ ID NO: 58491 - DNA, 20 bp, Human coronavirus
acaacttggtttttacaaat

SEQ ID NO: 58492 - DNA, 20 bp, Human coronavirus
gtttttacaaataaaacaac

SEQ ID NO: 58493 - DNA, 20 bp, Human coronavirus
ttacaaataaaacaacattg

SEQ ID NO: 58494 - DNA, 20 bp, Human coronavirus
tacaaataaaacaacattgc

SEQ ID NO: 58495 - DNA, 20 bp, Human coronavirus
acaaataaaacaacattgcc

SEQ ID NO: 58496 - DNA, 20 bp, Human coronavirus
atgaagttattatagataat

SEQ ID NO: 58497 - DNA, 20 bp, Human coronavirus
ttatagataataaaccttat

SEQ ID NO: 58498 - DNA, 20 bp, Human coronavirus
tagataataaaccttatagg

SEQ ID NO: 58499 - DNA, 20 bp, Human coronavirus
taggtggatgttgtggtgta

SEQ ID NO: 58500 - DNA, 20 bp, Human coronavirus
tggtgtaaagataaccactt

SEQ ID NO: 58501 - DNA, 20 bp, Human coronavirus
tgcactatggtgctggttct

SEQ ID NO: 58502 - DNA, 20 bp, Human coronavirus
gcactatggtgctggttctg

SEQ ID NO: 58503 - DNA, 20 bp, Human coronavirus
cactatggtgctggttctga

SEQ ID NO: 58504 - DNA, 20 bp, Human coronavirus
tgacaaaggtgtggcacctg

SEQ ID NO: 58505 - DNA, 20 bp, Human coronavirus
taaaacgttggctaccaccc

SEQ ID NO: 58506 - DNA, 20 bp, Human coronavirus
caattaggtgttcctgacaa

SEQ ID NO: 58507 - DNA, 20 bp, Human coronavirus
ggtgttcctgacaattcttc

SEQ ID NO: 58508 - DNA, 20 bp, Human coronavirus
ctgacaattcttcaactatt

SEQ ID NO: 58509 - DNA, 20 bp, Human coronavirus
ttcaactattgttacgggtt

SEQ ID NO: 58510 - DNA, 20 bp, Human coronavirus
aactattgttacgggtttat

SEQ ID NO: 58511 - DNA, 20 bp, Human coronavirus
atataatgtaactcgtactt

SEQ ID NO: 58512 - DNA, 20 bp, Human coronavirus
tataatgtaactcgtacttt

SEQ ID NO: 58513 - DNA, 20 bp, Human coronavirus
ttatgtgccagcagcttata

SEQ ID NO: 58514 - DNA, 20 bp, Human coronavirus
tatgtgccagcagcttataa

SEQ ID NO: 58515 - DNA, 20 bp, Human coronavirus
atgtgccagcagcttataaa

SEQ ID NO: 58516 - DNA, 20 bp, Human coronavirus
cccttttaataattggtttt

SEQ ID NO: 58517 - DNA, 20 bp, Human coronavirus
ccttttaataattggttttt

SEQ ID NO: 58518 - DNA, 20 bp, Human coronavirus
taataattggtttttgttaa

SEQ ID NO: 58519 - DNA, 20 bp, Human coronavirus
aataattggtttttgttaac

SEQ ID NO: 58520 - DNA, 20 bp, Human coronavirus
ataattggtttttgttaact

SEQ ID NO: 58521 - DNA, 20 bp, Human coronavirus
tggcccgtcctctcaacctt

SEQ ID NO: 58522 - DNA, 20 bp, Human coronavirus
ggcccgtcctctcaacctta

SEQ ID NO: 58523 - DNA, 20 bp, Human coronavirus
gcccgtcctctcaaccttat

SEQ ID NO: 58524 - DNA, 20 bp, Human coronavirus
ttactgttttataaacagca

SEQ ID NO: 58525 - DNA, 20 bp, Human coronavirus
ctgttttataaacagcacta

SEQ ID NO: 58526 - DNA, 20 bp, Human coronavirus
ggattgcaggatggttttta

SEQ ID NO: 58527 - DNA, 20 bp, Human coronavirus
gattgcaggatggtttttat

SEQ ID NO: 58528 - DNA, 20 bp, Human coronavirus
caggatggtttttattctgc

SEQ ID NO: 58529 - DNA, 20 bp, Human coronavirus
ttattctgcaaattttcttg

SEQ ID NO: 58530 - DNA, 20 bp, Human coronavirus
tattctgcaaattttcttga

SEQ ID NO: 58531 - DNA, 20 bp, Human coronavirus
ttattgtgacaccatgtaac

SEQ ID NO: 58532 - DNA, 20 bp, Human coronavirus
tattgtgacaccatgtaacc

SEQ ID NO: 58533 - DNA, 20 bp, Human coronavirus
attgtgacaccatgtaacca

SEQ ID NO: 58534 - DNA, 20 bp, Human coronavirus
ttgtgacaccatgtaaccaa

SEQ ID NO: 58535 - DNA, 20 bp, Human coronavirus
tgacaccatgtaaccaacca

SEQ ID NO: 58536 - DNA, 20 bp, Human coronavirus
aagccgtatagcaggacgta

SEQ ID NO: 58537 - DNA, 20 bp, Human coronavirus
ggaagatttgttgtttagca

SEQ ID NO: 58538 - DNA, 20 bp, Human coronavirus
gaagatttgttgtttagcaa

SEQ ID NO: 58539 - DNA, 20 bp, Human coronavirus
gttgtttagcaaagttgtta

SEQ ID NO: 58540 - DNA, 20 bp, Human coronavirus
ttgtttagcaaagttgttac

SEQ ID NO: 58541 - DNA, 20 bp, Human coronavirus
accatctcacttcacaattg

SEQ ID NO: 58542 - DNA, 20 bp, Human coronavirus
acaattgagacataattttc

SEQ ID NO: 58543 - DNA, 20 bp, Human coronavirus
agacataattttcaggccat

SEQ ID NO: 58544 - DNA, 20 bp, Human coronavirus
tcaggccatttctaattcaa

SEQ ID NO: 58545 - DNA, 20 bp, Human coronavirus
caggccatttctaattcaat

SEQ ID NO: 58546 - DNA, 20 bp, Human coronavirus
atggcatttatggctatgtt

SEQ ID NO: 58547 - DNA, 20 bp, Human coronavirus
atggctatgttctgcgtcaa

SEQ ID NO: 58548 - DNA, 20 bp, Human coronavirus
tggctatgttctgcgtcaac

SEQ ID NO: 58549 - DNA, 20 bp, Human coronavirus
tgcgtcaacctaacttggtt

SEQ ID NO: 58550 - DNA, 20 bp, Human coronavirus
gttctttattctgataatgg

SEQ ID NO: 58551 - DNA, 20 bp, Human coronavirus
gtgggtttggctcattattt

SEQ ID NO: 58552 - DNA, 20 bp, Human coronavirus
ggctcattatttctgttgtt

SEQ ID NO: 58553 - DNA, 20 bp, Human coronavirus
gctcattatttctgttgttt

SEQ ID NO: 58554 - DNA, 20 bp, Human coronavirus
tttctgttgtttttgttgta

SEQ ID NO: 58555 - DNA, 20 bp, Human coronavirus
ctgttgtttttgttgtattg

SEQ ID NO: 58556 - DNA, 20 bp, Human coronavirus
cagctgaagtactaaatgtc

SEQ ID NO: 58557 - DNA, 20 bp, Human coronavirus
tagaggtttatgtccattta

SEQ ID NO: 58558 - DNA, 20 bp, Human coronavirus
agaggtttatgtccatttac

SEQ ID NO: 58559 - DNA, 20 bp, Human coronavirus
gaggtttatgtccatttacg

SEQ ID NO: 58560 - DNA, 20 bp, Human coronavirus
atgtccatttacgtaactgg

SEQ ID NO: 58561 - DNA, 20 bp, Human coronavirus
acggacataattattactta

SEQ ID NO: 58562 - DNA, 20 bp, Human coronavirus
cggacataattattacttac

SEQ ID NO: 58563 - DNA, 20 bp, Human coronavirus
ttacttaccggtgatggctg

SEQ ID NO: 58564 - DNA, 20 bp, Human coronavirus
cttaccggtgatggctgcac

SEQ ID NO: 58565 - DNA, 20 bp, Human coronavirus
ccggtgatggctgcacctac

SEQ ID NO: 58566 - DNA, 20 bp, Human coronavirus
ggccgatgacagagctgcta

SEQ ID NO: 58567 - DNA, 20 bp, Human coronavirus
cctcctccttcattttacat

SEQ ID NO: 58568 - DNA, 20 bp, Human coronavirus
ctcctccttcattttacatg

SEQ ID NO: 58569 - DNA, 20 bp, Human coronavirus
attttacatgcctcttttgg

SEQ ID NO: 58570 - DNA, 20 bp, Human coronavirus
tacatgcctcttttggttag

SEQ ID NO: 58571 - DNA, 20 bp, Human coronavirus
tttgggttgctaaggaaggt

SEQ ID NO: 58572 - DNA, 20 bp, Human coronavirus
gggttgctaaggaaggtgct

SEQ ID NO: 58573 - DNA, 20 bp, Human coronavirus
ggttgctaaggaaggtgcta

SEQ ID NO: 58574 - DNA, 20 bp, Human coronavirus
ctaaggaaggtgctaaaact

SEQ ID NO: 58575 - DNA, 20 bp, Human coronavirus
ataccagtcttggtaatcgc

SEQ ID NO: 58576 - DNA, 20 bp, Human coronavirus
ttgctgctgttactttggct

SEQ ID NO: 58577 - DNA, 20 bp, Human coronavirus
ctgctgttactttggcttta

SEQ ID NO: 58578 - DNA, 20 bp, Human coronavirus
ctttggctttaaagaactta

SEQ ID NO: 58579 - DNA, 20 bp, Human coronavirus
ggctttaaagaacttaggtt

SEQ ID NO: 58580 - DNA, 20 bp, Human coronavirus
gctttaaagaacttaggttt

SEQ ID NO: 58581 - DNA, 20 bp, Human coronavirus
ctgaattgattcctaatcag

SEQ ID NO: 58582 - DNA, 20 bp, Human coronavirus
attcctaatcaggctgcgtt

SEQ ID NO: 58583 - DNA, 20 bp, Human coronavirus
ctaatcaggctgcgttattc

SEQ ID NO: 58584 - DNA, 20 bp, Human coronavirus
ttctttgatagtgaggttag

SEQ ID NO: 58585 - DNA, 20 bp, Human coronavirus
tttgatagtgaggttagcac

SEQ ID NO: 58586 - DNA, 20 bp, Human papillomavirus
gcctattggagtttgtttta

SEQ ID NO: 58587 - DNA, 20 bp, Human papillomavirus
gagtttgttttatattatca

SEQ ID NO: 58588 - DNA, 20 bp, Human papillomavirus
gttttatattatcaggagtc

SEQ ID NO: 58589 - DNA, 20 bp, Human papillomavirus
ttttatattatcaggagtct

SEQ ID NO: 58590 - DNA, 20 bp, Human papillomavirus
tatattatcaggagtcttat

SEQ ID NO: 58591 - DNA, 20 bp, Human papillomavirus
tgaggaaacgttagaggaaa

SEQ ID NO: 58592 - DNA, 20 bp, Human papillomavirus
gaggaaacctcacttggtga

SEQ ID NO: 58593 - DNA, 20 bp, Human papillomavirus
gtgacctagataatgtttct

SEQ ID NO: 58594 - DNA, 20 bp, Human papillomavirus
cttgtgttagcgacttatct

SEQ ID NO: 58595 - DNA, 20 bp, Human papillomavirus
ttgtgttagcgacttatctg

SEQ ID NO: 58596 - DNA, 20 bp, Human papillomavirus
tacagacctgacgcggtcgt

SEQ ID NO: 58597 - DNA, 20 bp, Human papillomavirus
acagacctgacgcggtcgta

SEQ ID NO: 58598 - DNA, 20 bp, Human papillomavirus
cagacctgacgcggtcgtac

SEQ ID NO: 58599 - DNA, 20 bp, Human papillomavirus
tggagattgggttttggcag

SEQ ID NO: 58600 - DNA, 20 bp, Human papillomavirus
ggttttggcagtttggggtg

SEQ ID NO: 58601 - DNA, 20 bp, Human papillomavirus
ttttggtataaaagatctat

SEQ ID NO: 58602 - DNA, 20 bp, Human papillomavirus
tggtataaaagatctatgtc

SEQ ID NO: 58603 - DNA, 20 bp, Human papillomavirus
ggtataaaagatctatgtct

SEQ ID NO: 58604 - DNA, 20 bp, Human papillomavirus
gtataaaagatctatgtctt

SEQ ID NO: 58605 - DNA, 20 bp, Human papillomavirus
aactgtttttacatggggta

SEQ ID NO: 58606 - DNA, 20 bp, Human papillomavirus
agcagtggaatctaattaga

SEQ ID NO: 58607 - DNA, 20 bp, Human papillomavirus
gacaagaacaagttcttttc

SEQ ID NO: 58608 - DNA, 20 bp, Human papillomavirus
ttttccatttcgccagaaaa

SEQ ID NO: 58609 - DNA, 20 bp, Human papillomavirus
tccatttcgccagaaaaaat

SEQ ID NO: 58610 - DNA, 20 bp, Human papillomavirus
ccatttcgccagaaaaaatg

SEQ ID NO: 58611 - DNA, 20 bp, Human papillomavirus
aagaagagtggcagcacact

SEQ ID NO: 58612 - DNA, 20 bp, Human papillomavirus
aggttacctatgacaataac

SEQ ID NO: 58613 - DNA, 20 bp, Human papillomavirus
cctatgacaataaccctgat

SEQ ID NO: 58614 - DNA, 20 bp, Human papillomavirus
caaattgtgtgccttgtctg

SEQ ID NO: 58615 - DNA, 20 bp, Human papillomavirus
tgtgccttgtctgattatca

SEQ ID NO: 58616 - DNA, 20 bp, Human papillomavirus
ggtgtagtcgatggacgtcg

SEQ ID NO: 58617 - DNA, 20 bp, Human papillomavirus
ctgggcggtgtcactctcgg

SEQ ID NO: 58618 - DNA, 20 bp, Human papillomavirus
gtaaagtttattgatgaggc

SEQ ID NO: 58619 - DNA, 20 bp, Human papillomavirus
attgatgaggctcaacgaga

SEQ ID NO: 58620 - DNA, 20 bp, Human papillomavirus
ttgatgaggctcaacgagag

SEQ ID NO: 58621 - DNA, 20 bp, Human papillomavirus
atgaggctcaacgagagaag

SEQ ID NO: 58622 - DNA, 20 bp, Human papillomavirus
cttgagagagttgctttgcc

SEQ ID NO: 58623 - DNA, 20 bp, Human papillomavirus
aaaataaaattgagcataca

SEQ ID NO: 58624 - DNA, 20 bp, Human papillomavirus
agcatacaacaattgctgat

SEQ ID NO: 58625 - DNA, 20 bp, Human papillomavirus
ctgataaaatattgcaatat

SEQ ID NO: 58626 - DNA, 20 bp, Human papillomavirus
caatatggcagtctgggagt

SEQ ID NO: 58627 - DNA, 20 bp, Human papillomavirus
ttttgggaggtttgggcatt

SEQ ID NO: 58628 - DNA, 20 bp, Human papillomavirus
tagatcctacaggccctgct

SEQ ID NO: 58629 - DNA, 20 bp, Human papillomavirus
ttcccctacaagatttaggt

SEQ ID NO: 58630 - DNA, 20 bp, Human papillomavirus
ccctacaagatttaggtaga

SEQ ID NO: 58631 - DNA, 20 bp, Human papillomavirus
aggtagagacttcccaatac

SEQ ID NO: 58632 - DNA, 20 bp, Human papillomavirus
ggtagagacttcccaatacc

SEQ ID NO: 58633 - DNA, 20 bp, Human papillomavirus
tatttgttagcaatggttca

SEQ ID NO: 58634 - DNA, 20 bp, Human papillomavirus
gttagcaatggttcaggtga

SEQ ID NO: 58635 - DNA, 20 bp, Human papillomavirus
ttagcaatggttcaggtgac

SEQ ID NO: 58636 - DNA, 20 bp, Human papillomavirus
gcaatggttcaggtgacagg

SEQ ID NO: 58637 - DNA, 20 bp, Human papillomavirus
aggtgacagggtggtgggcg

SEQ ID NO: 58638 - DNA, 20 bp, Human papillomavirus
atgaggtgtctattatcttc

SEQ ID NO: 58639 - DNA, 20 bp, Human papillomavirus
tcttccaaagagacttagat

SEQ ID NO: 58640 - DNA, 20 bp, Human papillomavirus
caaagagacttagatgctct

SEQ ID NO: 58641 - DNA, 20 bp, Human papillomavirus
gatgctcttgctcagacacc

SEQ ID NO: 58642 - DNA, 20 bp, Human papillomavirus
ctcagacaccagtgcctgaa

SEQ ID NO: 58643 - DNA, 20 bp, Human papillomavirus
aattattgcctttaggtgag

SEQ ID NO: 58644 - DNA, 20 bp, Human papillomavirus
ttgcctttaggtgagcatag

SEQ ID NO: 58645 - DNA, 20 bp, Human papillomavirus
cctttaggtgagcatagtca

SEQ ID NO: 58646 - DNA, 20 bp, Human papillomavirus
aggtgagcatagtcaaacaa

SEQ ID NO: 58647 - DNA, 20 bp, Human papillomavirus
ggtgagcatagtcaaacaac

SEQ ID NO: 58648 - DNA, 20 bp, Human papillomavirus
taccatgcaacatctgaacg

SEQ ID NO: 58649 - DNA, 20 bp, Human papillomavirus
gtttgagatctccagtaatc

SEQ ID NO: 58650 - DNA, 20 bp, Human papillomavirus
tttgagatctccagtaatca

SEQ ID NO: 58651 - DNA, 20 bp, Human papillomavirus
attactggagatctcaaaca

SEQ ID NO: 58652 - DNA, 20 bp, Human papillomavirus
ctggagatctcaaacaaagg

SEQ ID NO: 58653 - DNA, 20 bp, Human papillomavirus
gatgatgcagaaaatccaac

SEQ ID NO: 58654 - DNA, 20 bp, Human papillomavirus
tattaatactcatgcaaatg

SEQ ID NO: 58655 - DNA, 20 bp, Human papillomavirus
atactcatgcaaatggagat

SEQ ID NO: 58656 - DNA, 20 bp, Human papillomavirus
tagacaaaatactgcttttg

SEQ ID NO: 58657 - DNA, 20 bp, Human papillomavirus
tgatgcaaaacagacacaaa

SEQ ID NO: 58658 - DNA, 20 bp, Human papillomavirus
ctgctttacagcaagacaag

SEQ ID NO: 58659 - DNA, 20 bp, Human papillomavirus
acagcaagacaagtctgatg

SEQ ID NO: 58660 - DNA, 20 bp, Human papillomavirus
cagcaagacaagtctgatgt

SEQ ID NO: 58661 - DNA, 20 bp, Human papillomavirus
agatgttgttcaagcaacat

SEQ ID NO: 58662 - DNA, 20 bp, Human papillomavirus
gatgttgttcaagcaacatg

SEQ ID NO: 58663 - DNA, 20 bp, Human papillomavirus
catctgatgtccaattgttt

SEQ ID NO: 58664 - DNA, 20 bp, Human papillomavirus
atctgatgtccaattgttta

SEQ ID NO: 58665 - DNA, 20 bp, Human papillomavirus
tttaatagatcttactggct

SEQ ID NO: 58666 - DNA, 20 bp, Human papillomavirus
aatagatcttactggcttca

SEQ ID NO: 58667 - DNA, 20 bp, Human papillomavirus
atagatcttactggcttcag

SEQ ID NO: 58668 - DNA, 20 bp, Human papillomavirus
ctgcaatatgcaataaaagt

SEQ ID NO: 58669 - DNA, 20 bp, Human papillomavirus
ctttttgttaatccctccct

SEQ ID NO: 58670 - DNA, 20 bp, Human papillomavirus
tttttgttaatccctcccta

SEQ ID NO: 58671 - DNA, 20 bp, Human papillomavirus
ttgttaatccctccctactc

SEQ ID NO: 58672 - DNA, 20 bp, Human papillomavirus
tgttaatccctccctactcc

SEQ ID NO: 58673 - DNA, 20 bp, Human papillomavirus
gcccaaagacggtttgccaa

SEQ ID NO: 58674 - DNA, 20 bp, Human papillomavirus
cccaaagacggtttgccaac

SEQ ID NO: 58675 - DNA, 20 bp, Human papillomavirus
gccaaccgcggttaggactt

SEQ ID NO: 58676 - DNA, 20 bp, Human papillomavirus
ccaaccgcggttaggacttg

SEQ ID NO: 58677 - DNA, 20 bp, Human papillomavirus
ggacttgtttcaatttgctg

SEQ ID NO: 58678 - DNA, 20 bp, Human papillomavirus type 204
acttgtgcagcagatctgct

SEQ ID NO: 58679 - DNA, 20 bp, Human papillomavirus type 204
tgcagcagatctgctctcca

SEQ ID NO: 58680 - DNA, 20 bp, Human papillomavirus type 204
ttgattgtttatttttgtgt

SEQ ID NO: 58681 - DNA, 20 bp, Human papillomavirus type 204
tgattgtttatttttgtgtg

SEQ ID NO: 58682 - DNA, 20 bp, Human papillomavirus type 204
gattgtttatttttgtgtga

SEQ ID NO: 58683 - DNA, 20 bp, Human papillomavirus type 204
aatagatgaggcaccacaaa

SEQ ID NO: 58684 - DNA, 20 bp, Human papillomavirus type 204
atagatgaggcaccacaaag

SEQ ID NO: 58685 - DNA, 20 bp, Human papillomavirus type 204
cctggaattgttccaccaac

SEQ ID NO: 58686 - DNA, 20 bp, Human papillomavirus type 204
ttccaccaacaggaaagctt

SEQ ID NO: 58687 - DNA, 20 bp, Human papillomavirus type 204
caccaacaggaaagcttgga

SEQ ID NO: 58688 - DNA, 20 bp, Human papillomavirus type 204
tcgttgccaaatgaagttga

SEQ ID NO: 58689 - DNA, 20 bp, Human papillomavirus type 204
ccaaatgaagttgacactga

SEQ ID NO: 58690 - DNA, 20 bp, Human papillomavirus type 204
acactgatgttacggagagt

SEQ ID NO: 58691 - DNA, 20 bp, Human papillomavirus type 204
cggagagtcaaacccaggta

SEQ ID NO: 58692 - DNA, 20 bp, Human papillomavirus type 204
cattcagtttctacctgggt

SEQ ID NO: 58693 - DNA, 20 bp, Human papillomavirus type 204
gtttaaatgtacaatttcaa

SEQ ID NO: 58694 - DNA, 20 bp, Human papillomavirus type 204
aaatgtacaatttcaaaatt

SEQ ID NO: 58695 - DNA, 20 bp, Human papillomavirus type 204
aatgtacaatttcaaaattg

SEQ ID NO: 58696 - DNA, 20 bp, Human papillomavirus type 204
caaaattgacattcacatat

SEQ ID NO: 58697 - DNA, 20 bp, Human papillomavirus type 204
aaaattgacattcacatatg

SEQ ID NO: 58698 - DNA, 20 bp, Human papillomavirus type 204
ttggttgcagcccttatcag

SEQ ID NO: 58699 - DNA, 20 bp, Human papillomavirus type 204
tggttgcagcccttatcaga

SEQ ID NO: 58700 - DNA, 20 bp, Human papillomavirus type 204
ggttgcagcccttatcagat

SEQ ID NO: 58701 - DNA, 20 bp, Human papillomavirus type 204
gttgcagcccttatcagata

SEQ ID NO: 58702 - DNA, 20 bp, Human papillomavirus type 204
cagcccttatcagatacaaa

SEQ ID NO: 58703 - DNA, 20 bp, Human papillomavirus type 204
aagatcaaataacacattgg

SEQ ID NO: 58704 - DNA, 20 bp, Human papillomavirus type 204
gaccttaataaaacaagagc

SEQ ID NO: 58705 - DNA, 20 bp, Human papillomavirus type 204
ataaaacaagagcaagtgct

SEQ ID NO: 58706 - DNA, 20 bp, Human papillomavirus type 204
ttcactatgctcgacaaaat

SEQ ID NO: 58707 - DNA, 20 bp, Human papillomavirus type 204
tcactatgctcgacaaaatg

SEQ ID NO: 58708 - DNA, 20 bp, Human papillomavirus type 204
ggtgtcttcttcggtggtct

SEQ ID NO: 58709 - DNA, 20 bp, Human papillomavirus type 204
ttcggtggtcttggtattgg

SEQ ID NO: 58710 - DNA, 20 bp, Human papillomavirus type 204
ggtggtcttggtattggaac

SEQ ID NO: 58711 - DNA, 20 bp, Human papillomavirus type 204
gtattggaactggtagagga

SEQ ID NO: 58712 - DNA, 20 bp, Human papillomavirus type 204
gaactggtagaggatctggt

SEQ ID NO: 58713 - DNA, 20 bp, Human papillomavirus type 204
accctgcttctgatcttcct

SEQ ID NO: 58714 - DNA, 20 bp, Human papillomavirus type 204
tgatcttcctacatctacta

SEQ ID NO: 58715 - DNA, 20 bp, Human papillomavirus type 204
ctacatctactacaataggg

SEQ ID NO: 58716 - DNA, 20 bp, Human papillomavirus type 204
attttgggtcacccctattg

SEQ ID NO: 58717 - DNA, 20 bp, Human papillomavirus type 204
tgggtcacccctattgtagt

SEQ ID NO: 58718 - DNA, 20 bp, Human papillomavirus type 204
ttgaatttcatagtgggcgt

SEQ ID NO: 58719 - DNA, 20 bp, Human papillomavirus type 204
aatttcatagtgggcgtgca

SEQ ID NO: 58720 - DNA, 20 bp, Human papillomavirus type 204
catagtgggcgtgcatccag

SEQ ID NO: 58721 - DNA, 20 bp, Human papillomavirus type 204
atagtgggcgtgcatccagc

SEQ ID NO: 58722 - DNA, 20 bp, Human papillomavirus type 204
gacacagatattgtagcaga

SEQ ID NO: 58723 - DNA, 20 bp, Human papillomavirus type 204
aatagatttgatgatgtgga

SEQ ID NO: 58724 - DNA, 20 bp, Human papillomavirus type 204
atagatttgatgatgtggaa

SEQ ID NO: 58725 - DNA, 20 bp, Human papillomavirus type 204
gatgatgtggaaaatcctgc

SEQ ID NO: 58726 - DNA, 20 bp, Human papillomavirus type 204
atgatgtggaaaatcctgct

SEQ ID NO: 58727 - DNA, 20 bp, Human papillomavirus type 204
gatcctaaacaaacacaagt

SEQ ID NO: 58728 - DNA, 20 bp, Human papillomavirus type 204
tggaaatttggattttaggc

SEQ ID NO: 58729 - DNA, 20 bp, Human papillomavirus type 204
ggaaatttggattttaggcg

SEQ ID NO: 58730 - DNA, 20 bp, Human papillomavirus type 204
gaaatttggattttaggcga

SEQ ID NO: 58731 - DNA, 20 bp, Human papillomavirus type 204
ggattttaggcgattacaag

SEQ ID NO: 58732 - DNA, 20 bp, Human papillomavirus type 204
gattttaggcgattacaagg

SEQ ID NO: 58733 - DNA, 20 bp, Human papillomavirus type 204
ctacagacaattattttgct

SEQ ID NO: 58734 - DNA, 20 bp, Human papillomavirus type 204
ttttgctgttcccagtggtt

SEQ ID NO: 58735 - DNA, 20 bp, Human papillomavirus type 204
tgctgttcccagtggttctc

SEQ ID NO: 58736 - DNA, 20 bp, Human papillomavirus type 204
gctgttcccagtggttctct

SEQ ID NO: 58737 - DNA, 20 bp, Human papillomavirus type 204
ctgttcccagtggttctctc

SEQ ID NO: 58738 - DNA, 20 bp, Human papillomavirus type 204
agtacggtatgtatatccct

SEQ ID NO: 58739 - DNA, 20 bp, Human papillomavirus type 204
taaacatctcagacaagttg

SEQ ID NO: 58740 - DNA, 20 bp, Human papillomavirus type 204
tagcatcctttttggcagca

SEQ ID NO: 58741 - DNA, 20 bp, Human papillomavirus type 204
ttggcagcatcgtttggcag

SEQ ID NO: 58742 - DNA, 20 bp, Human papillomavirus type 204
tggcagcatcgtttggcagc

SEQ ID NO: 58743 - DNA, 20 bp, Influenza B virus
aggtgggtccgggagcaacc

SEQ ID NO: 58744 - DNA, 20 bp, Influenza B virus
gaagcaggaattctggagtg

SEQ ID NO: 58745 - DNA, 20 bp, Influenza B virus
aagcaggaattctggagtgc

SEQ ID NO: 58746 - DNA, 20 bp, Influenza B virus
tggagtgctatgaaaggttt

SEQ ID NO: 58747 - DNA, 20 bp, Influenza B virus
tcatggcaaagagcccttga

SEQ ID NO: 58748 - DNA, 20 bp, Influenza B virus
tgtttatggatccctctgct

SEQ ID NO: 58749 - DNA, 20 bp, Influenza B virus
atggatccctctgctggaat

SEQ ID NO: 58750 - DNA, 20 bp, Influenza B virus
tggatccctctgctggaatt

SEQ ID NO: 58751 - DNA, 20 bp, Influenza B virus
aagggtttgagccatactgt

SEQ ID NO: 58752 - DNA, 20 bp, Influenza B virus
gagccatactgtgtgaaaaa

SEQ ID NO: 58753 - DNA, 20 bp, Influenza B virus
tccttgagagtgttggtgaa

SEQ ID NO: 58754 - DNA, 20 bp, Influenza B virus
agagtgttggtgaacggaac

SEQ ID NO: 58755 - DNA, 20 bp, Influenza B virus
gtgaacggaaccttcctcaa

SEQ ID NO: 58756 - DNA, 20 bp, Influenza B virus
ctcaagcaccctaatggaga

SEQ ID NO: 58757 - DNA, 20 bp, Influenza B virus
tcaactcttcatagattgaa

SEQ ID NO: 58758 - DNA, 20 bp, Influenza B virus
aaagccaattcgagcagctg

SEQ ID NO: 58759 - DNA, 20 bp, Influenza B virus
gagcagctgaaactgcggtg

SEQ ID NO: 58760 - DNA, 20 bp, Influenza B virus
tcccaatttggtcaagagca

SEQ ID NO: 58761 - DNA, 20 bp, Influenza B virus
ggtcaagagcaccgattatc

SEQ ID NO: 58762 - DNA, 20 bp, Influenza B virus
gtcaagagcaccgattatca

SEQ ID NO: 58763 - DNA, 20 bp, Hepatitis A virus
atacctcaccgccgtttgcc

SEQ ID NO: 58764 - DNA, 20 bp, Hepatitis A virus
gcctaggctataggctaaat

SEQ ID NO: 58765 - DNA, 20 bp, Hepatitis A virus
cctaggctataggctaaatt

SEQ ID NO: 58766 - DNA, 20 bp, Hepatitis A virus
tccctttcccttttcccttt

SEQ ID NO: 58767 - DNA, 20 bp, Hepatitis A virus
ccctttcccttttccctttc

SEQ ID NO: 58768 - DNA, 20 bp, Hepatitis A virus
gggacacagatgtttggaac

SEQ ID NO: 58769 - DNA, 20 bp, Hepatitis A virus
ggaacgtcaccttgcagtgt

SEQ ID NO: 58770 - DNA, 20 bp, Hepatitis A virus
gaacgtcaccttgcagtgtt

SEQ ID NO: 58771 - DNA, 20 bp, Hepatitis A virus
cagtgttaacttggctttca

SEQ ID NO: 58772 - DNA, 20 bp, Hepatitis A virus
acttggctttcatgaatctc

SEQ ID NO: 58773 - DNA, 20 bp, Hepatitis A virus
ggcagacattgaggaagagc

SEQ ID NO: 58774 - DNA, 20 bp, Hepatitis A virus
gcagacattgaggaagagca

SEQ ID NO: 58775 - DNA, 20 bp, Hepatitis A virus
aggaagagcaaatgattcaa

SEQ ID NO: 58776 - DNA, 20 bp, Hepatitis A virus
aatcagttgataggactgca

SEQ ID NO: 58777 - DNA, 20 bp, Hepatitis A virus
ataggactgcagtgactggt

SEQ ID NO: 58778 - DNA, 20 bp, Hepatitis A virus
gctgttcaagggttgttgag

SEQ ID NO: 58779 - DNA, 20 bp, Hepatitis A virus
ctgttcaagggttgttgaga

SEQ ID NO: 58780 - DNA, 20 bp, Hepatitis A virus
aagggttgttgagataccat

SEQ ID NO: 58781 - DNA, 20 bp, Hepatitis A virus
ttgagataccatacatatgc

SEQ ID NO: 58782 - DNA, 20 bp, Hepatitis A virus
agataccatacatatgcaag

SEQ ID NO: 58783 - DNA, 20 bp, Hepatitis A virus
ccactttaaagatccacaat

SEQ ID NO: 58784 - DNA, 20 bp, Hepatitis A virus
aaagatccacaatacccagt

SEQ ID NO: 58785 - DNA, 20 bp, Hepatitis A virus
aagatccacaatacccagtt

SEQ ID NO: 58786 - DNA, 20 bp, Hepatitis A virus
gggaattgacaattagagtt

SEQ ID NO: 58787 - DNA, 20 bp, Hepatitis A virus
ggaattgacaattagagttt

SEQ ID NO: 58788 - DNA, 20 bp, Hepatitis A virus
ggatcaggaagattggaaat

SEQ ID NO: 58789 - DNA, 20 bp, Hepatitis A virus
gatcaggaagattggaaatc

SEQ ID NO: 58790 - DNA, 20 bp, Hepatitis A virus
gaaatctgatccgtcccagg

SEQ ID NO: 58791 - DNA, 20 bp, Hepatitis A virus
ctcattttactacttggaca

SEQ ID NO: 58792 - DNA, 20 bp, Hepatitis A virus
tactacttggacatctattc

SEQ ID NO: 58793 - DNA, 20 bp, Hepatitis A virus
ttcccaccaaatatcattca

SEQ ID NO: 58794 - DNA, 20 bp, Hepatitis A virus
tcccaccaaatatcattcag

SEQ ID NO: 58795 - DNA, 20 bp, Hepatitis A virus
cccaccaaatatcattcagg

SEQ ID NO: 58796 - DNA, 20 bp, Hepatitis A virus
ccaccaaatatcattcaggt

SEQ ID NO: 58797 - DNA, 20 bp, Hepatitis A virus
aggtagattactgttttgtt

SEQ ID NO: 58798 - DNA, 20 bp, Hepatitis A virus
ggaagcttattgtgtattgt

SEQ ID NO: 58799 - DNA, 20 bp, Hepatitis A virus
ttgtgtattgttataacaga

SEQ ID NO: 58800 - DNA, 20 bp, Hepatitis A virus
tgtattgttataacagattg

SEQ ID NO: 58801 - DNA, 20 bp, Hepatitis A virus
ttataacagattgacctctc

SEQ ID NO: 58802 - DNA, 20 bp, Hepatitis A virus
taacagattgacctctcctt

SEQ ID NO: 58803 - DNA, 20 bp, Hepatitis A virus
caggagtacaagcacctgtg

SEQ ID NO: 58804 - DNA, 20 bp, Hepatitis A virus
aggagtacaagcacctgtgg

SEQ ID NO: 58805 - DNA, 20 bp, Hepatitis A virus
aggatccagttttagcaaag

SEQ ID NO: 58806 - DNA, 20 bp, Hepatitis A virus
tagcaaagaaagtacctgag

SEQ ID NO: 58807 - DNA, 20 bp, Hepatitis A virus
agcaaagaaagtacctgaga

SEQ ID NO: 58808 - DNA, 20 bp, Hepatitis A virus
gccatcaacactgaggtggt

SEQ ID NO: 58809 - DNA, 20 bp, Hepatitis A virus
ccatcaacactgaggtggtt

SEQ ID NO: 58810 - DNA, 20 bp, Hepatitis A virus
ttcaacttgtttcagttgta

SEQ ID NO: 58811 - DNA, 20 bp, Hepatitis A virus
tcaacttgtttcagttgtat

SEQ ID NO: 58812 - DNA, 20 bp, Hepatitis A virus
caacttgtttcagttgtata

SEQ ID NO: 58813 - DNA, 20 bp, Hepatitis A virus
gagagtcatatagaatgcag

SEQ ID NO: 58814 - DNA, 20 bp, Hepatitis A virus
agagtcatatagaatgcagg

SEQ ID NO: 58815 - DNA, 20 bp, Hepatitis A virus
gaagttgggaaacaaagact

SEQ ID NO: 58816 - DNA, 20 bp, Hepatitis A virus
ggaaacaaagactcaagtat

SEQ ID NO: 58817 - DNA, 20 bp, Hepatitis A virus
atttgacaattcttcctgag

SEQ ID NO: 58818 - DNA, 20 bp, Hepatitis A virus
aaggaggtttggattctctt

SEQ ID NO: 58819 - DNA, 20 bp, Hepatitis A virus
aggaggtttggattctcttt

SEQ ID NO: 58820 - DNA, 20 bp, Hepatitis A virus
ggattctctttggccgcagg

SEQ ID NO: 58821 - DNA, 20 bp, Hepatitis A virus
gattctctttggccgcaggc

SEQ ID NO: 58822 - DNA, 20 bp, Hepatitis A virus
tctttggccgcaggcagaag

SEQ ID NO: 58823 - DNA, 20 bp, Hepatitis A virus
gcatcattgatgatattggc

SEQ ID NO: 58824 - DNA, 20 bp, Hepatitis A virus
catcattgatgatattggcc

SEQ ID NO: 58825 - DNA, 20 bp, Hepatitis A virus
atgatattggccaaaacaca

SEQ ID NO: 58826 - DNA, 20 bp, Hepatitis A virus
gccaaaacacaacagatgag

SEQ ID NO: 58827 - DNA, 20 bp, Hepatitis A virus
gtcagatttttgtcagttag

SEQ ID NO: 58828 - DNA, 20 bp, Hepatitis A virus
tctggctttttccaatctgt

SEQ ID NO: 58829 - DNA, 20 bp, Hepatitis A virus
ttccaatctgttactaatca

SEQ ID NO: 58830 - DNA, 20 bp, Hepatitis A virus
tccaatctgttactaatcac

SEQ ID NO: 58831 - DNA, 20 bp, Hepatitis A virus
ccaatctgttactaatcaca

SEQ ID NO: 58832 - DNA, 20 bp, Hepatitis A virus
caatctgttactaatcacaa

SEQ ID NO: 58833 - DNA, 20 bp, Hepatitis A virus
ggaagaacttggttcagttt

SEQ ID NO: 58834 - DNA, 20 bp, Hepatitis A virus
gttcagtttggagttggaga

SEQ ID NO: 58835 - DNA, 20 bp, Hepatitis A virus
agtttggagttggagagaag

SEQ ID NO: 58836 - DNA, 20 bp, Hepatitis A virus
ggagttggagagaagaatgg

SEQ ID NO: 58837 - DNA, 20 bp, Hepatitis A virus
gagttggagagaagaatgga

SEQ ID NO: 58838 - DNA, 20 bp, Hepatitis A virus
gtttcatcgaatcaatctat

SEQ ID NO: 58839 - DNA, 20 bp, Hepatitis A virus
catcgaatcaatctatacag

SEQ ID NO: 58840 - DNA, 20 bp, Hepatitis A virus
atcgaatcaatctatacaga

SEQ ID NO: 58841 - DNA, 20 bp, Hepatitis A virus
ggcatccatgttgctggagg

SEQ ID NO: 58842 - DNA, 20 bp, Hepatitis A virus
ctggaggaaattcaattctt

SEQ ID NO: 58843 - DNA, 20 bp, Hepatitis A virus
attttcctgcagctatgccc

SEQ ID NO: 58844 - DNA, 20 bp, Hepatitis A virus
tcctgcagctatgccctttt

SEQ ID NO: 58845 - DNA, 20 bp, Hepatitis A virus
cctgcagctatgcccttttc

SEQ ID NO: 58846 - DNA, 20 bp, Hepatitis A virus
ctgcagctatgcccttttct

SEQ ID NO: 58847 - DNA, 20 bp, Hepatitis A virus
tctaaagctgaaattgatcc

SEQ ID NO: 58848 - DNA, 20 bp, Hepatitis A virus
accaaaagagatttaatttg

SEQ ID NO: 58849 - DNA, 20 bp, Hepatitis A virus
aatttggttggatgaaaatg

SEQ ID NO: 58850 - DNA, 20 bp, Hepatitis A virus
atttggttggatgaaaatgg

SEQ ID NO: 58851 - DNA, 20 bp, Hepatitis A virus
ggttggatgaaaatggttta

SEQ ID NO: 58852 - DNA, 20 bp, Hepatitis A virus
gttggatgaaaatggtttat

SEQ ID NO: 58853 - DNA, 20 bp, Hepatitis A virus
gggtccagctattagttatt

SEQ ID NO: 58854 - DNA, 20 bp, Hepatitis A virus
gttattttcatttgaatcca

SEQ ID NO: 58855 - DNA, 20 bp, Hepatitis A virus
ttttcatttgaatccaggtt

SEQ ID NO: 58856 - DNA, 20 bp, Hepatitis A virus
tcatttgaatccaggtttcc

SEQ ID NO: 58857 - DNA, 20 bp, Hepatitis A virus
catttgaatccaggtttcca

SEQ ID NO: 58858 - DNA, 20 bp, Influenza A virus
tcgctcaaaaacttcccgga

SEQ ID NO: 58859 - DNA, 20 bp, Influenza A virus
cgctcaaaaacttcccggaa

SEQ ID NO: 58860 - DNA, 20 bp, Influenza A virus
gctcaaaaacttcccggaaa

SEQ ID NO: 58861 - DNA, 20 bp, Influenza A virus
ccggaaatgacaacagcacg

SEQ ID NO: 58862 - DNA, 20 bp, Influenza A virus
ggcaccatgcagtaccaaac

SEQ ID NO: 58863 - DNA, 20 bp, Influenza A virus
caaaataagaaatgggacct

SEQ ID NO: 58864 - DNA, 20 bp, Influenza A virus
ttgttgaacgcagcaaagcc

SEQ ID NO: 58865 - DNA, 20 bp, Influenza A virus
tgttgaacgcagcaaagcct

SEQ ID NO: 58866 - DNA, 20 bp, Influenza A virus
gttgaacgcagcaaagccta

SEQ ID NO: 58867 - DNA, 20 bp, Influenza A virus
ttgaacgcagcaaagcctac

SEQ ID NO: 58868 - DNA, 20 bp, Influenza A virus
aacgtgactatgccaaacaa

SEQ ID NO: 58869 - DNA, 20 bp, Influenza A virus
gacaaactgtacatttgggg

SEQ ID NO: 58870 - DNA, 20 bp, Influenza A virus
acaaactgtacatttggggg

SEQ ID NO: 58871 - DNA, 20 bp, Influenza A virus
ggggggttcaccacccgggt

SEQ ID NO: 58872 - DNA, 20 bp, Influenza A virus
gggggttcaccacccgggta

SEQ ID NO: 58873 - DNA, 20 bp, Influenza A virus
ctcctcggggttacttcaaa

SEQ ID NO: 58874 - DNA, 20 bp, Influenza A virus
cttcaaaatacgaagtggga

SEQ ID NO: 58875 - DNA, 20 bp, Influenza A virus
aaaatacgaagtgggaaaag

SEQ ID NO: 58876 - DNA, 20 bp, Influenza A virus
gcaaatgcaattctgaatgc

SEQ ID NO: 58877 - DNA, 20 bp, Influenza A virus
tgaatgcatcactccaaatg

SEQ ID NO: 58878 - DNA, 20 bp, Influenza A virus
ggcgcaatcgcgggtttcat

SEQ ID NO: 58879 - DNA, 20 bp, Influenza A virus
gcgcaatcgcgggtttcata

SEQ ID NO: 58880 - DNA, 20 bp, Influenza A virus
catagaaaatggttgggagg

SEQ ID NO: 58881 - DNA, 20 bp, Influenza A virus
atagaaaatggttgggaggg

SEQ ID NO: 58882 - DNA, 20 bp, Influenza A virus
ggagggaatggtagacggtt

SEQ ID NO: 58883 - DNA, 20 bp, Influenza A virus
aggacactaaaatagatctc

SEQ ID NO: 58884 - DNA, 20 bp, Influenza A virus
ttgtggccctggagaaccaa

SEQ ID NO: 58885 - DNA, 20 bp, Influenza A virus
tggccctggagaaccaacat

SEQ ID NO: 58886 - DNA, 20 bp, Influenza A virus
gatcaattgtatgttggttc

SEQ ID NO: 58887 - DNA, 20 bp, Influenza A virus
tatgttggttctccagggcc

SEQ ID NO: 58888 - DNA, 20 bp, Influenza A virus
cagatcaaaggtgttgagtt

SEQ ID NO: 58889 - DNA, 20 bp, Influenza A virus
agttgaagtcaggatacaaa

SEQ ID NO: 58890 - DNA, 20 bp, Influenza A virus
aagtcaggatacaaagattg

SEQ ID NO: 58891 - DNA, 20 bp, Influenza A virus
gatcctatggatttcctttg

SEQ ID NO: 58892 - DNA, 20 bp, Influenza A virus
cctttgccatatcatgtttt

SEQ ID NO: 58893 - DNA, 20 bp, Human papillomavirus type 96
ctaggacattttatatacag

SEQ ID NO: 58894 - DNA, 20 bp, Human papillomavirus type 96
taggacattttatatacaga

SEQ ID NO: 58895 - DNA, 20 bp, Human papillomavirus type 96
tatatacagacatacagatc

SEQ ID NO: 58896 - DNA, 20 bp, Human papillomavirus type 96
atatacagacatacagatct

SEQ ID NO: 58897 - DNA, 20 bp, Human papillomavirus type 96
tatacagacatacagatctc

SEQ ID NO: 58898 - DNA, 20 bp, Human papillomavirus type 96
gaacatttttatgaaaaaac

SEQ ID NO: 58899 - DNA, 20 bp, Human papillomavirus type 96
aacatttttatgaaaaaaca

SEQ ID NO: 58900 - DNA, 20 bp, Human papillomavirus type 96
ttatgaaaaaacagtcaagg

SEQ ID NO: 58901 - DNA, 20 bp, Human papillomavirus type 96
tatgaaaaaacagtcaaggg

SEQ ID NO: 58902 - DNA, 20 bp, Human papillomavirus type 96
atgaaaaaacagtcaaggga

SEQ ID NO: 58903 - DNA, 20 bp, Human papillomavirus type 96
tcctgcccattgacctgcat

SEQ ID NO: 58904 - DNA, 20 bp, Human papillomavirus type 96
acctgcattgtgacgaagag

SEQ ID NO: 58905 - DNA, 20 bp, Human papillomavirus type 96
tgacgaagagttgacagaag

SEQ ID NO: 58906 - DNA, 20 bp, Human papillomavirus type 96
acagaagagcagtcagaaaa

SEQ ID NO: 58907 - DNA, 20 bp, Human papillomavirus type 96
tgacaggttttctgactgct

SEQ ID NO: 58908 - DNA, 20 bp, Human papillomavirus type 96
cagaaatggcagataataga

SEQ ID NO: 58909 - DNA, 20 bp, Human papillomavirus type 96
atcctaaagaagggtgtagt

SEQ ID NO: 58910 - DNA, 20 bp, Human papillomavirus type 96
gttttctcttgaagcagact

SEQ ID NO: 58911 - DNA, 20 bp, Human papillomavirus type 96
tctcttgaagcagactgtag

SEQ ID NO: 58912 - DNA, 20 bp, Human papillomavirus type 96
ctcttgaagcagactgtagt

SEQ ID NO: 58913 - DNA, 20 bp, Human papillomavirus type 96
aaacgaaagtatttcagtcc

SEQ ID NO: 58914 - DNA, 20 bp, Human papillomavirus type 96
cagtccgaaagagttgcagc

SEQ ID NO: 58915 - DNA, 20 bp, Human papillomavirus type 96
agtccgaaagagttgcagca

SEQ ID NO: 58916 - DNA, 20 bp, Human papillomavirus type 96
cagcagcttagccctcgttt

SEQ ID NO: 58917 - DNA, 20 bp, Human papillomavirus type 96
gccctcgtttggaagcaata

SEQ ID NO: 58918 - DNA, 20 bp, Human papillomavirus type 96
ggggtggggtttatggaact

SEQ ID NO: 58919 - DNA, 20 bp, Human papillomavirus type 96
gggtggggtttatggaactg

SEQ ID NO: 58920 - DNA, 20 bp, Human papillomavirus type 96
atggaactgtgtaggaaatt

SEQ ID NO: 58921 - DNA, 20 bp, Human papillomavirus type 96
tggaactgtgtaggaaattt

SEQ ID NO: 58922 - DNA, 20 bp, Human papillomavirus type 96
aatagcaataagacttgttg

SEQ ID NO: 58923 - DNA, 20 bp, Human papillomavirus type 96
tgataaaattagtacaacat

SEQ ID NO: 58924 - DNA, 20 bp, Human papillomavirus type 96
gataaaattagtacaacatg

SEQ ID NO: 58925 - DNA, 20 bp, Human papillomavirus type 96
ataaaattagtacaacatgg

SEQ ID NO: 58926 - DNA, 20 bp, Human papillomavirus type 96
gtacaacatggtcatgggtg

SEQ ID NO: 58927 - DNA, 20 bp, Human papillomavirus type 96
acaaggtaatacacgcatag

SEQ ID NO: 58928 - DNA, 20 bp, Human papillomavirus type 96
tgttacaaatatttacaggg

SEQ ID NO: 58929 - DNA, 20 bp, Human papillomavirus type 96
caaatatttacaggggctgt

SEQ ID NO: 58930 - DNA, 20 bp, Human papillomavirus type 96
acaggggctgtaaggcagct

SEQ ID NO: 58931 - DNA, 20 bp, Human papillomavirus type 96
caggggctgtaaggcagctg

SEQ ID NO: 58932 - DNA, 20 bp, Human papillomavirus type 96
ttaataaagttgaacaaaaa

SEQ ID NO: 58933 - DNA, 20 bp, Human papillomavirus type 96
gatacagtcaaccctattga

SEQ ID NO: 58934 - DNA, 20 bp, Human papillomavirus type 96
accctgttgcaccttcagtt

SEQ ID NO: 58935 - DNA, 20 bp, Human papillomavirus type 96
caccttcagttgtccctctt

SEQ ID NO: 58936 - DNA, 20 bp, Human papillomavirus type 96
agttgtccctcttacagaca

SEQ ID NO: 58937 - DNA, 20 bp, Human papillomavirus type 96
tccctcttacagacacagga

SEQ ID NO: 58938 - DNA, 20 bp, Human papillomavirus type 96
ggaaacgagcaaccatcaga

SEQ ID NO: 58939 - DNA, 20 bp, Human papillomavirus type 96
gcactcaagttcacttttac

SEQ ID NO: 58940 - DNA, 20 bp, Human papillomavirus type 96
acttttacagagatataagc

SEQ ID NO: 58941 - DNA, 20 bp, Human papillomavirus type 96
tacagagatataagcactat

SEQ ID NO: 58942 - DNA, 20 bp, Human papillomavirus type 96
acagagatataagcactatt

SEQ ID NO: 58943 - DNA, 20 bp, Human papillomavirus type 96
gtaatttttttgcagatgtc

SEQ ID NO: 58944 - DNA, 20 bp, Human papillomavirus type 96
taatttttttgcagatgtca

SEQ ID NO: 58945 - DNA, 20 bp, Human papillomavirus type 96
ttttgcagatgtcatcattg

SEQ ID NO: 58946 - DNA, 20 bp, Human papillomavirus type 96
tttgcagatgtcatcattgt

SEQ ID NO: 58947 - DNA, 20 bp, Human papillomavirus type 96
ttgcagatgtcatcattgtg

SEQ ID NO: 58948 - DNA, 20 bp, Human papillomavirus type 96
agggtacacttaccggatcc

SEQ ID NO: 58949 - DNA, 20 bp, Human papillomavirus type 96
gggtacacttaccggatcct

SEQ ID NO: 58950 - DNA, 20 bp, Human papillomavirus type 96
ccggatcctaacagatttgc

SEQ ID NO: 58951 - DNA, 20 bp, Human papillomavirus type 96
gctctagctgacatgtcagt

SEQ ID NO: 58952 - DNA, 20 bp, Human papillomavirus type 96
ctctagctgacatgtcagtg

SEQ ID NO: 58953 - DNA, 20 bp, Human papillomavirus type 96
aaatgtttgttttgggttgt

SEQ ID NO: 58954 - DNA, 20 bp, Human papillomavirus type 96
gttttgggttgtataccctg

SEQ ID NO: 58955 - DNA, 20 bp, Human papillomavirus type 96
ttttgggttgtataccctgc

SEQ ID NO: 58956 - DNA, 20 bp, Human papillomavirus type 96
tgggttgtataccctgcttg

SEQ ID NO: 58957 - DNA, 20 bp, Human papillomavirus type 96
gggttgtataccctgcttgg

SEQ ID NO: 58958 - DNA, 20 bp, Human papillomavirus type 96
cttcttttatgccagaagag

SEQ ID NO: 58959 - DNA, 20 bp, Human papillomavirus type 96
ttttatgccagaagagaaca

SEQ ID NO: 58960 - DNA, 20 bp, Human papillomavirus type 96
tatgccagaagagaacaatg

SEQ ID NO: 58961 - DNA, 20 bp, Human papillomavirus type 96
atgccagaagagaacaatgt

SEQ ID NO: 58962 - DNA, 20 bp, Human papillomavirus type 96
tgccagaagagaacaatgtt

SEQ ID NO: 58963 - DNA, 20 bp, Influenza A virus
ctcatgcagattgccatcct

SEQ ID NO: 58964 - DNA, 20 bp, Influenza A virus
ccatcctggtaactactgtg

SEQ ID NO: 58965 - DNA, 20 bp, Influenza A virus
cattttaagcaacatgagtg

SEQ ID NO: 58966 - DNA, 20 bp, Influenza A virus
taagcaacatgagtgcgact

SEQ ID NO: 58967 - DNA, 20 bp, Influenza A virus
aagcaacatgagtgcgactc

SEQ ID NO: 58968 - DNA, 20 bp, Influenza A virus
gcacctttttctaaggacaa

SEQ ID NO: 58969 - DNA, 20 bp, Influenza A virus
cacctttttctaaggacaat

SEQ ID NO: 58970 - DNA, 20 bp, Influenza A virus
ttctaaggacaattcaatcc

SEQ ID NO: 58971 - DNA, 20 bp, Influenza A virus
tctaaggacaattcaatccg

SEQ ID NO: 58972 - DNA, 20 bp, Influenza A virus
ctaaggacaattcaatccgg

SEQ ID NO: 58973 - DNA, 20 bp, Influenza A virus
tcacgatggaaaagcatggt

SEQ ID NO: 58974 - DNA, 20 bp, Influenza A virus
catgtttgtgtcactgggga

SEQ ID NO: 58975 - DNA, 20 bp, Influenza A virus
gtgtcactggggatgataaa

SEQ ID NO: 58976 - DNA, 20 bp, Influenza A virus
tgtcactggggatgataaaa

SEQ ID NO: 58977 - DNA, 20 bp, Influenza A virus
catttttatcatccccagtg

SEQ ID NO: 58978 - DNA, 20 bp, Influenza A virus
tcaggaagtgctcagcatgt

SEQ ID NO: 58979 - DNA, 20 bp, Influenza A virus
ctgttatcctcgatatcctg

SEQ ID NO: 58980 - DNA, 20 bp, Influenza A virus
tcctcgatatcctgacgtca

SEQ ID NO: 58981 - DNA, 20 bp, Influenza A virus
gagcctttccagttgtctct

SEQ ID NO: 58982 - DNA, 20 bp, Influenza A virus
ccagttgtctctgcagatac

SEQ ID NO: 58983 - DNA, 20 bp, Influenza A virus
gacaatggagatgacgtgtg

SEQ ID NO: 58984 - DNA, 20 bp, Influenza A virus
acaatggagatgacgtgtgg

SEQ ID NO: 58985 - DNA, 20 bp, Influenza A virus
acgctcaggttatgaaactt

SEQ ID NO: 58986 - DNA, 20 bp, Influenza A virus
cgctcaggttatgaaacttt

SEQ ID NO: 58987 - DNA, 20 bp, Influenza A virus
tgaaactttcaaagtcattg

SEQ ID NO: 58988 - DNA, 20 bp, Human beta herpesvirus 6A
cacgcgcgtgtcggctacga

SEQ ID NO: 58989 - DNA, 20 bp, Human beta herpesvirus 6A
cacgcgacagatccgtctct

SEQ ID NO: 58990 - DNA, 20 bp, Human beta herpesvirus 6A
gagtgggagagcacagagct

SEQ ID NO: 58991 - DNA, 20 bp, Human beta herpesvirus 6A
cgcccgcgtctccagtccgt

SEQ ID NO: 58992 - DNA, 20 bp, Human beta herpesvirus 6A
gcccgcgtctccagtccgtc

SEQ ID NO: 58993 - DNA, 20 bp, Human beta herpesvirus 6A
ccttcgcgtttctctccaca

SEQ ID NO: 58994 - DNA, 20 bp, Human beta herpesvirus 6A
gcgtttctctccacatctcc

SEQ ID NO: 58995 - DNA, 20 bp, Human beta herpesvirus 6A
ctctccacatctccgcacgt

SEQ ID NO: 58996 - DNA, 20 bp, Human beta herpesvirus 6A
tctccacatctccgcacgtc

SEQ ID NO: 58997 - DNA, 20 bp, Human beta herpesvirus 6A
acgtcaaccgccaggacggg

SEQ ID NO: 58998 - DNA, 20 bp, Human beta herpesvirus 6A
ttccgcccatgaggcgggac

SEQ ID NO: 58999 - DNA, 20 bp, Human beta herpesvirus 6A
cgcccatgaggcgggacttc

SEQ ID NO: 59000 - DNA, 20 bp, Human beta herpesvirus 6A
gagacgagccacccttcgta

SEQ ID NO: 59001 - DNA, 20 bp, Human beta herpesvirus 6A
gtatacgtccggcccctccc

SEQ ID NO: 59002 - DNA, 20 bp, Human beta herpesvirus 6A
cgcaacgagggggtgcgtcc

SEQ ID NO: 59003 - DNA, 20 bp, Human beta herpesvirus 6A
acaagacgagggctgcaacg

SEQ ID NO: 59004 - DNA, 20 bp, Human beta herpesvirus 6A
caagacgagggctgcaacgc

SEQ ID NO: 59005 - DNA, 20 bp, Human beta herpesvirus 6A
ttcatacgtcacggcgtcgc

SEQ ID NO: 59006 - DNA, 20 bp, Human beta herpesvirus 6A
atacgtcacggcgtcgcgtt

SEQ ID NO: 59007 - DNA, 20 bp, Human beta herpesvirus 6A
cagccctcgtcttgtaaact

SEQ ID NO: 59008 - DNA, 20 bp, Human beta herpesvirus 6A
ccgaggagggcccgcgcgcg

SEQ ID NO: 59009 - DNA, 20 bp, Human beta herpesvirus 6A
tctctcctccggcgtatcct

SEQ ID NO: 59010 - DNA, 20 bp, Human beta herpesvirus 6A
tccggcctcccgggtacggc

SEQ ID NO: 59011 - DNA, 20 bp, Human beta herpesvirus 6A
cgccgtgtctttcgataagg

SEQ ID NO: 59012 - DNA, 20 bp, Human beta herpesvirus 6A
gccgtgtctttcgataaggc

SEQ ID NO: 59013 - DNA, 20 bp, Human beta herpesvirus 6A
cgataaggctctcgtgccgt

SEQ ID NO: 59014 - DNA, 20 bp, Human beta herpesvirus 6A
gataaggctctcgtgccgtt

SEQ ID NO: 59015 - DNA, 20 bp, Human beta herpesvirus 6A
ccagagaccgaacgcgtcct

SEQ ID NO: 59016 - DNA, 20 bp, Human beta herpesvirus 6A
cagagaccgaacgcgtcctc

SEQ ID NO: 59017 - DNA, 20 bp, Human beta herpesvirus 6A
aacgcgtagatctccccgca

SEQ ID NO: 59018 - DNA, 20 bp, Human beta herpesvirus 6A
aacggtgtgttcgacgacgc

SEQ ID NO: 59019 - DNA, 20 bp, Human beta herpesvirus 6A
acggtgtgttcgacgacgcg

SEQ ID NO: 59020 - DNA, 20 bp, Human beta herpesvirus 6A
ggaatggtatacgtgacccg

SEQ ID NO: 59021 - DNA, 20 bp, Human beta herpesvirus 6A
tcggacgggtcccttataaa

SEQ ID NO: 59022 - DNA, 20 bp, Human beta herpesvirus 6A
taaatgtcgtggtccaataa

SEQ ID NO: 59023 - DNA, 20 bp, Human beta herpesvirus 6A
ttggaccacgacatttataa

SEQ ID NO: 59024 - DNA, 20 bp, Human beta herpesvirus 6A
gaccacgacatttataaggg

SEQ ID NO: 59025 - DNA, 20 bp, Human beta herpesvirus 6A
accagcacgttgtctatcca

SEQ ID NO: 59026 - DNA, 20 bp, Human beta herpesvirus 6A
tctatccaatcgtaataata

SEQ ID NO: 59027 - DNA, 20 bp, Human beta herpesvirus 6A
ttacgattggatagacaacg

SEQ ID NO: 59028 - DNA, 20 bp, Human beta herpesvirus 6A
cgattggatagacaacgtgc

SEQ ID NO: 59029 - DNA, 20 bp, Human beta herpesvirus 6A
gatagacaacgtgctggtta

SEQ ID NO: 59030 - DNA, 20 bp, Human beta herpesvirus 6A
attaaatttcagcctccgtt

SEQ ID NO: 59031 - DNA, 20 bp, Human beta herpesvirus 6A
ttaaatttcagcctccgttt

SEQ ID NO: 59032 - DNA, 20 bp, Human beta herpesvirus 6A
aatttcagcctccgttttga

SEQ ID NO: 59033 - DNA, 20 bp, Human beta herpesvirus 6A
cagcctccgttttgactcac

SEQ ID NO: 59034 - DNA, 20 bp, Human beta herpesvirus 6A
agcctccgttttgactcaca

SEQ ID NO: 59035 - DNA, 20 bp, Human beta herpesvirus 6A
cacatttcttgcaactctgc

SEQ ID NO: 59036 - DNA, 20 bp, Human beta herpesvirus 6A
cttgcaactctgcggcagac

SEQ ID NO: 59037 - DNA, 20 bp, Human beta herpesvirus 6A
ttgcaactctgcggcagact

SEQ ID NO: 59038 - DNA, 20 bp, Human beta herpesvirus 6A
caactctgcggcagactttg

SEQ ID NO: 59039 - DNA, 20 bp, Human beta herpesvirus 6A
gtgggaaatggaattttaca

SEQ ID NO: 59040 - DNA, 20 bp, Human beta herpesvirus 6A
ttagccactgcacccactaa

SEQ ID NO: 59041 - DNA, 20 bp, Human beta herpesvirus 6A
gccactgcacccactaaaca

SEQ ID NO: 59042 - DNA, 20 bp, Human beta herpesvirus 6A
caaacttgcaaacctgacct

SEQ ID NO: 59043 - DNA, 20 bp, Human beta herpesvirus 6A
caaacctgacctcgataaag

SEQ ID NO: 59044 - DNA, 20 bp, Human beta herpesvirus 6A
atttgctcttccatatgtcg

SEQ ID NO: 59045 - DNA, 20 bp, Human beta herpesvirus 6A
cccgccggagatttcaaagc

SEQ ID NO: 59046 - DNA, 20 bp, Human beta herpesvirus 6A
caaagcatactttcgcaaca

SEQ ID NO: 59047 - DNA, 20 bp, Human beta herpesvirus 6A
aaagcatactttcgcaacat

SEQ ID NO: 59048 - DNA, 20 bp, Human beta herpesvirus 6A
cgcaacatagagggaaatga

SEQ ID NO: 59049 - DNA, 20 bp, Human beta herpesvirus 6A
gcaacatagagggaaatgac

SEQ ID NO: 59050 - DNA, 20 bp, Human beta herpesvirus 6A
ggcatctctcgatctagtac

SEQ ID NO: 59051 - DNA, 20 bp, Human beta herpesvirus 6A
gcatctctcgatctagtaca

SEQ ID NO: 59052 - DNA, 20 bp, Human beta herpesvirus 6A
accgcagagttgcctgagtt

SEQ ID NO: 59053 - DNA, 20 bp, Human beta herpesvirus 6A
ccgcagagttgcctgagttt

SEQ ID NO: 59054 - DNA, 20 bp, Human beta herpesvirus 6A
cctgagttttcggtattcga

SEQ ID NO: 59055 - DNA, 20 bp, Human beta herpesvirus 6A
agtatagtctagtgtgtcgt

SEQ ID NO: 59056 - DNA, 20 bp, Human beta herpesvirus 6A
gttgtgtcgcactgggtttt

SEQ ID NO: 59057 - DNA, 20 bp, Human beta herpesvirus 6A
tgtcgcactgggttttgaag

SEQ ID NO: 59058 - DNA, 20 bp, Human beta herpesvirus 6A
tgaagaagaagatgggatgt

SEQ ID NO: 59059 - DNA, 20 bp, Human beta herpesvirus 6A
gaagaagaagatgggatgtg

SEQ ID NO: 59060 - DNA, 20 bp, Human beta herpesvirus 6A
tttgtataaaagttaaatgt

SEQ ID NO: 59061 - DNA, 20 bp, Human beta herpesvirus 6A
ttgtataaaagttaaatgtt

SEQ ID NO: 59062 - DNA, 20 bp, Human beta herpesvirus 6A
tgtataaaagttaaatgtta

SEQ ID NO: 59063 - DNA, 20 bp, Human beta herpesvirus 6A
gtataaaagttaaatgttat

SEQ ID NO: 59064 - DNA, 20 bp, Human beta herpesvirus 6A
tataaaagttaaatgttata

SEQ ID NO: 59065 - DNA, 20 bp, Human beta herpesvirus 6A
tttttctcttttaaatgtta

SEQ ID NO: 59066 - DNA, 20 bp, Human beta herpesvirus 6A
ttttctcttttaaatgttac

SEQ ID NO: 59067 - DNA, 20 bp, Human beta herpesvirus 6A
tttctcttttaaatgttaca

SEQ ID NO: 59068 - DNA, 20 bp, Human beta herpesvirus 6A
ttctcttttaaatgttacaa

SEQ ID NO: 59069 - DNA, 20 bp, Human beta herpesvirus 6A
tctcttttaaatgttacaac

SEQ ID NO: 59070 - DNA, 20 bp, Human beta herpesvirus 6A
atatttagcgtgacggtgct

SEQ ID NO: 59071 - DNA, 20 bp, Human beta herpesvirus 6A
agcgtgacggtgctccgatc

SEQ ID NO: 59072 - DNA, 20 bp, Human beta herpesvirus 6A
gcgtgacggtgctccgatca

SEQ ID NO: 59073 - DNA, 20 bp, Human beta herpesvirus 6A
tttcgtgattggaaaccgtc

SEQ ID NO: 59074 - DNA, 20 bp, Human beta herpesvirus 6A
cgtgattggaaaccgtcgct

SEQ ID NO: 59075 - DNA, 20 bp, Human beta herpesvirus 6A
aataaagaagagaaccttcc

SEQ ID NO: 59076 - DNA, 20 bp, Human beta herpesvirus 6A
ccgagggtcattcgactcac

SEQ ID NO: 59077 - DNA, 20 bp, Human beta herpesvirus 6A
gactcacatcattgaagcgg

SEQ ID NO: 59078 - DNA, 20 bp, Human beta herpesvirus 6A
aagcggattacgttcgctgc

SEQ ID NO: 59079 - DNA, 20 bp, Human beta herpesvirus 6A
cgttcgctgcaacggcgatc

SEQ ID NO: 59080 - DNA, 20 bp, Human beta herpesvirus 6A
gattgcgcgattaggttaga

SEQ ID NO: 59081 - DNA, 20 bp, Human beta herpesvirus 6A
cgcgattaggttagattcgg

SEQ ID NO: 59082 - DNA, 20 bp, Human beta herpesvirus 6A
ggttagattcggaaaccata

SEQ ID NO: 59083 - DNA, 20 bp, Human beta herpesvirus 6A
gattcggaaaccatagctgt

SEQ ID NO: 59084 - DNA, 20 bp, Human beta herpesvirus 6A
ggaaaccatagctgtccatg

SEQ ID NO: 59085 - DNA, 20 bp, Human beta herpesvirus 6A
ggtttggccttgttccgtaa

SEQ ID NO: 59086 - DNA, 20 bp, Human beta herpesvirus 6A
ggccttgttccgtaattaaa

SEQ ID NO: 59087 - DNA, 20 bp, Human beta herpesvirus 6A
gccttgttccgtaattaaaa

SEQ ID NO: 59088 - DNA, 20 bp, Human beta herpesvirus 6A
ttccgtaattaaaacgtcgt

SEQ ID NO: 59089 - DNA, 20 bp, Human beta herpesvirus 6A
cgtaattaaaacgtcgttga

SEQ ID NO: 59090 - DNA, 20 bp, Human beta herpesvirus 6A
cttgcgattgttctgcgata

SEQ ID NO: 59091 - DNA, 20 bp, Human beta herpesvirus 6A
cgattgttctgcgatagagg

SEQ ID NO: 59092 - DNA, 20 bp, Human beta herpesvirus 6A
ttctgcgatagaggaattgc

SEQ ID NO: 59093 - DNA, 20 bp, Human beta herpesvirus 6A
tgcgatagaggaattgcttt

SEQ ID NO: 59094 - DNA, 20 bp, Human beta herpesvirus 6A
ctttgtcacgagtcgcttct

SEQ ID NO: 59095 - DNA, 20 bp, Human beta herpesvirus 6A
gcaagcagaccagtttacag

SEQ ID NO: 59096 - DNA, 20 bp, Human beta herpesvirus 6A
caagcagaccagtttacagg

SEQ ID NO: 59097 - DNA, 20 bp, Human beta herpesvirus 6A
acaggtatgggcgcaaagtg

SEQ ID NO: 59098 - DNA, 20 bp, Human beta herpesvirus 6A
caggtatgggcgcaaagtgc

SEQ ID NO: 59099 - DNA, 20 bp, Human beta herpesvirus 6A
cacatgccgcaagatactgg

SEQ ID NO: 59100 - DNA, 20 bp, Human beta herpesvirus 6A
gtgcctctaaccgttgttct

SEQ ID NO: 59101 - DNA, 20 bp, Human beta herpesvirus 6A
ttcttggagatgacgggtta

SEQ ID NO: 59102 - DNA, 20 bp, Human beta herpesvirus 6A
ttggagatgacgggttagag

SEQ ID NO: 59103 - DNA, 20 bp, Human beta herpesvirus 6A
gagatgacgggttagagatt

SEQ ID NO: 59104 - DNA, 20 bp, Human beta herpesvirus 6A
gagattttggaagcatacgt

SEQ ID NO: 59105 - DNA, 20 bp, Human beta herpesvirus 6A
gtgacgccaaaaaatgctta

SEQ ID NO: 59106 - DNA, 20 bp, Human beta herpesvirus 6A
tgccttattgttcgacgatg

SEQ ID NO: 59107 - DNA, 20 bp, Human beta herpesvirus 6A
ttgttcgacgatgatttgtg

SEQ ID NO: 59108 - DNA, 20 bp, Human beta herpesvirus 6A
ttcgacgatgatttgtgttt

SEQ ID NO: 59109 - DNA, 20 bp, Human beta herpesvirus 6A
gacgatgatttgtgtttgct

SEQ ID NO: 59110 - DNA, 20 bp, Human beta herpesvirus 6A
cgctactccataggctattt

SEQ ID NO: 59111 - DNA, 20 bp, Human beta herpesvirus 6A
gttttttcagtacggcggaa

SEQ ID NO: 59112 - DNA, 20 bp, Human beta herpesvirus 6A
ttttttcagtacggcggaat

SEQ ID NO: 59113 - DNA, 20 bp, Human beta herpesvirus 6A
tttcagtacggcggaatctc

SEQ ID NO: 59114 - DNA, 20 bp, Human beta herpesvirus 6A
ttcagtacggcggaatctcg

SEQ ID NO: 59115 - DNA, 20 bp, Human beta herpesvirus 6A
gctcgtgatcctacaagggc

SEQ ID NO: 59116 - DNA, 20 bp, Human beta herpesvirus 6A
tgccacgacgtgctgcaagg

SEQ ID NO: 59117 - DNA, 20 bp, Human beta herpesvirus 6A
cagcacgtcgtggcagaaca

SEQ ID NO: 59118 - DNA, 20 bp, Human beta herpesvirus 6A
gcgaggtgcagaccgctgct

SEQ ID NO: 59119 - DNA, 20 bp, Human beta herpesvirus 6A
gtccagcagcggtctgcacc

SEQ ID NO: 59120 - DNA, 20 bp, Human beta herpesvirus 6A
cgcgacgctgggcgcgtctc

SEQ ID NO: 59121 - DNA, 20 bp, Human beta herpesvirus 6A
gacgtgatcgccgcggccgc

SEQ ID NO: 59122 - DNA, 20 bp, Human beta herpesvirus 6A
tgttcgtcggcggccgcggc

SEQ ID NO: 59123 - DNA, 20 bp, Human beta herpesvirus 6A
gtcggcggccgcggcgatca

SEQ ID NO: 59124 - DNA, 20 bp, Human beta herpesvirus 6A
gttccgcacatacgctggtc

SEQ ID NO: 59125 - DNA, 20 bp, Human beta herpesvirus 6A
cgcacatacgctggtccggc

SEQ ID NO: 59126 - DNA, 20 bp, Human beta herpesvirus 6A
ggtggtcttgactttggcgg

SEQ ID NO: 59127 - DNA, 20 bp, Human beta herpesvirus 6A
actttggcgggacctctgtt

SEQ ID NO: 59128 - DNA, 20 bp, Human beta herpesvirus 6A
ggcgggacctctgttagcgt

SEQ ID NO: 59129 - DNA, 20 bp, Human beta herpesvirus 6A
gcgggacctctgttagcgtt

SEQ ID NO: 59130 - DNA, 20 bp, Human beta herpesvirus 6A
tccttccctcttccctttaa

SEQ ID NO: 59131 - DNA, 20 bp, Human beta herpesvirus 6A
ccttccctcttccctttaac

SEQ ID NO: 59132 - DNA, 20 bp, Human beta herpesvirus 6A
cttccctcttccctttaacc

SEQ ID NO: 59133 - DNA, 20 bp, Human beta herpesvirus 6A
cctcttccctttaaccccac

SEQ ID NO: 59134 - DNA, 20 bp, Human beta herpesvirus 6A
cctttaaccccacgaaaaat

SEQ ID NO: 59135 - DNA, 20 bp, Influenza B virus
atttgattataaaaccaaga

SEQ ID NO: 59136 - DNA, 20 bp, Influenza B virus
tttgattataaaaccaagag

SEQ ID NO: 59137 - DNA, 20 bp, Influenza B virus
gattataaaaccaagaggtt

SEQ ID NO: 59138 - DNA, 20 bp, Influenza B virus
attataaaaccaagaggttt

SEQ ID NO: 59139 - DNA, 20 bp, Influenza B virus
taaaaccaagaggtttatcg

SEQ ID NO: 59140 - DNA, 20 bp, Influenza B virus
agtttgaaaaacctatggca

SEQ ID NO: 59141 - DNA, 20 bp, Influenza B virus
gaaaaacctatggcaagttc

SEQ ID NO: 59142 - DNA, 20 bp, Influenza B virus
aaaaacctatggcaagttct

SEQ ID NO: 59143 - DNA, 20 bp, Influenza B virus
taataggggaagaagaaatt

SEQ ID NO: 59144 - DNA, 20 bp, Influenza B virus
aaaaaggaattgacttcaaa

SEQ ID NO: 59145 - DNA, 20 bp, Influenza B virus
acaaccatgagctaccagaa

SEQ ID NO: 59146 - DNA, 20 bp, Influenza B virus
caaccatgagctaccagaag

SEQ ID NO: 59147 - DNA, 20 bp, Influenza B virus
catataatgcctttctcctc

SEQ ID NO: 59148 - DNA, 20 bp, Influenza B virus
ctcctcatgtctgatgagtt

SEQ ID NO: 59149 - DNA, 20 bp, Influenza B virus
tcctcatgtctgatgagttg

SEQ ID NO: 59150 - DNA, 20 bp, Influenza B virus
cagaaaaccaattatgccaa

SEQ ID NO: 59151 - DNA, 20 bp, Influenza B virus
tgccaagtgggccacaggag

SEQ ID NO: 59152 - DNA, 20 bp, Influenza B virus
ggttcttcttggtacatcgt

SEQ ID NO: 59153 - DNA, 20 bp, Influenza B virus
ttcttggtacatcgtttcgt

SEQ ID NO: 59154 - DNA, 20 bp, Influenza B virus
ttggtacatcgtttcgtcat

SEQ ID NO: 59155 - DNA, 20 bp, Influenza B virus
aaaattggctccctatttgt

SEQ ID NO: 59156 - DNA, 20 bp, Influenza B virus
aaattggctccctatttgtg

SEQ ID NO: 59157 - DNA, 20 bp, Influenza B virus
gctccctatttgtgagtgga

SEQ ID NO: 59158 - DNA, 20 bp, Influenza B virus
gtgagtggaagagaaaaacc

SEQ ID NO: 59159 - DNA, 20 bp, Influenza B virus
tgagtggaagagaaaaacct

SEQ ID NO: 59160 - DNA, 20 bp, Influenza B virus
tttcaagggagacagagtga

SEQ ID NO: 59161 - DNA, 20 bp, Influenza B virus
caagggagacagagtgaata

SEQ ID NO: 59162 - DNA, 20 bp, Influenza B virus
aagggagacagagtgaataa

SEQ ID NO: 59163 - DNA, 20 bp, Influenza B virus
cagtattgggactcaggaag

SEQ ID NO: 59164 - DNA, 20 bp, Influenza B virus
agtattgggactcaggaagg

SEQ ID NO: 59165 - DNA, 20 bp, Influenza A virus
accttctagaagacaagcat

SEQ ID NO: 59166 - DNA, 20 bp, Influenza A virus
tagaagacaagcataacggg

SEQ ID NO: 59167 - DNA, 20 bp, Influenza A virus
gtttgcatagtttcccgtta

SEQ ID NO: 59168 - DNA, 20 bp, Influenza A virus
gcatagtttcccgttatgct

SEQ ID NO: 59169 - DNA, 20 bp, Influenza A virus
catagtttcccgttatgctt

SEQ ID NO: 59170 - DNA, 20 bp, Influenza A virus
tggaaacacctagttcagac

SEQ ID NO: 59171 - DNA, 20 bp, Influenza A virus
agacaatggaacgtgttacc

SEQ ID NO: 59172 - DNA, 20 bp, Influenza A virus
cccaggagatttcatcgatt

SEQ ID NO: 59173 - DNA, 20 bp, Influenza A virus
catcgattatgaggagctaa

SEQ ID NO: 59174 - DNA, 20 bp, Influenza A virus
atcgattatgaggagctaag

SEQ ID NO: 59175 - DNA, 20 bp, Influenza A virus
accatccatctactagtgct

SEQ ID NO: 59176 - DNA, 20 bp, Influenza A virus
ttgtggggtcatcaagatac

SEQ ID NO: 59177 - DNA, 20 bp, Influenza A virus
tgtggggtcatcaagataca

SEQ ID NO: 59178 - DNA, 20 bp, Influenza A virus
gtggggtcatcaagatacag

SEQ ID NO: 59179 - DNA, 20 bp, Influenza A virus
tggggtcatcaagatacagc

SEQ ID NO: 59180 - DNA, 20 bp, Influenza A virus
gcaatggaaagaaatgctgg

SEQ ID NO: 59181 - DNA, 20 bp, Influenza A virus
tcatttcagatacaccagtc

SEQ ID NO: 59182 - DNA, 20 bp, Influenza A virus
cagatacaccagtccacgat

SEQ ID NO: 59183 - DNA, 20 bp, Influenza A virus
agatacaccagtccacgatt

SEQ ID NO: 59184 - DNA, 20 bp, Influenza A virus
caatacaacttgtcaaacac

SEQ ID NO: 59185 - DNA, 20 bp, Influenza A virus
gggccattgccggtttcatt

SEQ ID NO: 59186 - DNA, 20 bp, Influenza A virus
ccggtttcattgaagggggg

SEQ ID NO: 59187 - DNA, 20 bp, Influenza A virus
cattgaaggggggtggacag

SEQ ID NO: 59188 - DNA, 20 bp, Influenza A virus
attgaaggggggtggacagg

SEQ ID NO: 59189 - DNA, 20 bp, Influenza A virus
aaggggggtggacagggatg

SEQ ID NO: 59190 - DNA, 20 bp, Human herpesvirus 6B
gttaacgggatcgtcccctt

SEQ ID NO: 59191 - DNA, 20 bp, Human herpesvirus 6B
acgggatcgtccccttggct

SEQ ID NO: 59192 - DNA, 20 bp, Human herpesvirus 6B
gctcgtgctcctacaagcgc

SEQ ID NO: 59193 - DNA, 20 bp, Human herpesvirus 6B
gaacacgtcgtggcagaaca

SEQ ID NO: 59194 - DNA, 20 bp, Human herpesvirus 6B
taggagcacgagccaagggg

SEQ ID NO: 59195 - DNA, 20 bp, Human herpesvirus 6B
cctcgagtgacgccggagac

SEQ ID NO: 59196 - DNA, 20 bp, Human herpesvirus 6B
ctcgagtgacgccggagaca

SEQ ID NO: 59197 - DNA, 20 bp, Human herpesvirus 6B
acctgaacgacacctccctg

SEQ ID NO: 59198 - DNA, 20 bp, Human herpesvirus 6B
gagctgctgctgcgcctggg

SEQ ID NO: 59199 - DNA, 20 bp, Human herpesvirus 6B
aggtcaagcgccaggacggg

SEQ ID NO: 59200 - DNA, 20 bp, Human herpesvirus 6B
ccgccgacgcgcctgcgcga

SEQ ID NO: 59201 - DNA, 20 bp, Human herpesvirus 6B
gagtgggggtgagagggacg

SEQ ID NO: 59202 - DNA, 20 bp, Human herpesvirus 6B
gcttgcggtggtgtgttttt

SEQ ID NO: 59203 - DNA, 20 bp, Human herpesvirus 6B
cttgcggtggtgtgtttttt

SEQ ID NO: 59204 - DNA, 20 bp, Human herpesvirus 6B
cggtggtgtgtttttttttt

SEQ ID NO: 59205 - DNA, 20 bp, Human herpesvirus 6B
gcaaggcgagggctgcagcg

SEQ ID NO: 59206 - DNA, 20 bp, Human herpesvirus 6B
caaggcgagggctgcagcgg

SEQ ID NO: 59207 - DNA, 20 bp, Human herpesvirus 6B
gttccgcacatacgccggtc

SEQ ID NO: 59208 - DNA, 20 bp, Human herpesvirus 6B
cgcacatacgccggtccggc

SEQ ID NO: 59209 - DNA, 20 bp, Human herpesvirus 6B
ctcatacgccacggggtccc

SEQ ID NO: 59210 - DNA, 20 bp, Human herpesvirus 6B
tgggaaacgtgcccacgccg

SEQ ID NO: 59211 - DNA, 20 bp, Human herpesvirus 6B
cccagaatcacgcctccgct

SEQ ID NO: 59212 - DNA, 20 bp, Human herpesvirus 6B
ccagaatcacgcctccgctg

SEQ ID NO: 59213 - DNA, 20 bp, Human herpesvirus 6B
tccgccctcctgggtacggc

SEQ ID NO: 59214 - DNA, 20 bp, Human herpesvirus 6B
gccgcgcggagctttctttg

SEQ ID NO: 59215 - DNA, 20 bp, Human herpesvirus 6B
ctttgagtttgccgtaccca

SEQ ID NO: 59216 - DNA, 20 bp, Human herpesvirus 6B
tttgagtttgccgtacccag

SEQ ID NO: 59217 - DNA, 20 bp, Human herpesvirus 6B
gagtttgccgtacccaggag

SEQ ID NO: 59218 - DNA, 20 bp, Human herpesvirus 6B
ccatgagacacttggaaccg

SEQ ID NO: 59219 - DNA, 20 bp, Human herpesvirus 6B
catgagacacttggaaccgt

SEQ ID NO: 59220 - DNA, 20 bp, Human herpesvirus 6B
gaaccgtagacgggctcgaa

SEQ ID NO: 59221 - DNA, 20 bp, Human herpesvirus 6B
cagagaccgaacgcgtcctc

SEQ ID NO: 59222 - DNA, 20 bp, Human herpesvirus 6B
ggtctctggaagcacggctt

SEQ ID NO: 59223 - DNA, 20 bp, Human herpesvirus 6B
gccaactcggcctgcgtgat

SEQ ID NO: 59224 - DNA, 20 bp, Human herpesvirus 6B
gccacctccgacatgctcgg

SEQ ID NO: 59225 - DNA, 20 bp, Human herpesvirus 6B
gccaagctgtctcgcggata

SEQ ID NO: 59226 - DNA, 20 bp, Human herpesvirus 6B
aattttccagcgattcgaat

SEQ ID NO: 59227 - DNA, 20 bp, Human herpesvirus 6B
tccagcgattcgaatctggg

SEQ ID NO: 59228 - DNA, 20 bp, Human herpesvirus 6B
ccagcgattcgaatctgggg

SEQ ID NO: 59229 - DNA, 20 bp, Human herpesvirus 6B
cagcgattcgaatctggggc

SEQ ID NO: 59230 - DNA, 20 bp, Human herpesvirus 6B
gaatctggggccgtcataca

SEQ ID NO: 59231 - DNA, 20 bp, Human herpesvirus 6B
tttatgacagtgaacagaga

SEQ ID NO: 59232 - DNA, 20 bp, Human herpesvirus 6B
ttatgacagtgaacagagag

SEQ ID NO: 59233 - DNA, 20 bp, Human herpesvirus 6B
tatgacagtgaacagagagc

SEQ ID NO: 59234 - DNA, 20 bp, Human herpesvirus 6B
atgacagtgaacagagagca

SEQ ID NO: 59235 - DNA, 20 bp, Human herpesvirus 6B
tgacagtgaacagagagcag

SEQ ID NO: 59236 - DNA, 20 bp, Human herpesvirus 6B
ccaaaagactatgtagtaca

SEQ ID NO: 59237 - DNA, 20 bp, Human herpesvirus 6B
tcatccactgacgattctga

SEQ ID NO: 59238 - DNA, 20 bp, Human herpesvirus 6B
catccactgacgattctgat

SEQ ID NO: 59239 - DNA, 20 bp, Human herpesvirus 6B
atccactgacgattctgatg

SEQ ID NO: 59240 - DNA, 20 bp, Human herpesvirus 6B
tgatggcgagttctgatcat

SEQ ID NO: 59241 - DNA, 20 bp, Human herpesvirus 6B
catagagcatggcgcacgct

SEQ ID NO: 59242 - DNA, 20 bp, Human herpesvirus 6B
taacttcgacggacgatccc

SEQ ID NO: 59243 - DNA, 20 bp, Human herpesvirus 6B
aacttcgacggacgatccca

SEQ ID NO: 59244 - DNA, 20 bp, Human herpesvirus 6B
acttcgacggacgatcccat

SEQ ID NO: 59245 - DNA, 20 bp, Human herpesvirus 6B
gacggacgatcccatattgt

SEQ ID NO: 59246 - DNA, 20 bp, Human herpesvirus 6B
tctcgatataccggatcata

SEQ ID NO: 59247 - DNA, 20 bp, Human herpesvirus 6B
ctcgatataccggatcataa

SEQ ID NO: 59248 - DNA, 20 bp, Human herpesvirus 6B
tcgatataccggatcataac

SEQ ID NO: 59249 - DNA, 20 bp, Human herpesvirus 6B
cgtcgtttccgccaacaaat

SEQ ID NO: 59250 - DNA, 20 bp, Human herpesvirus 6B
ccgccaacaaatacagtgtc

SEQ ID NO: 59251 - DNA, 20 bp, Human herpesvirus 6B
ccccaggcagaaacatatcc

SEQ ID NO: 59252 - DNA, 20 bp, Human herpesvirus 6B
cccaggcagaaacatatcca

SEQ ID NO: 59253 - DNA, 20 bp, Human herpesvirus 6B
caatctctctgggcagcaaa

SEQ ID NO: 59254 - DNA, 20 bp, Human herpesvirus 6B
tttaaaaggaaaaataactt

SEQ ID NO: 59255 - DNA, 20 bp, Human herpesvirus 6B
aaaaggaaaaataactttat

SEQ ID NO: 59256 - DNA, 20 bp, Human herpesvirus 6B
gttgtgaagactccattgaa

SEQ ID NO: 59257 - DNA, 20 bp, Human herpesvirus 6B
tgaagactccattgaatgtt

SEQ ID NO: 59258 - DNA, 20 bp, Human herpesvirus 6B
aatgttcgttccaatgggcc

SEQ ID NO: 59259 - DNA, 20 bp, Human herpesvirus 6B
gttccaatgggccgatatcg

SEQ ID NO: 59260 - DNA, 20 bp, Human herpesvirus 6B
caatgggccgatatcgtcga

SEQ ID NO: 59261 - DNA, 20 bp, Human herpesvirus 6B
tcgtaagcattctactaaac

SEQ ID NO: 59262 - DNA, 20 bp, Human herpesvirus 6B
tactaaacgcgtataccgac

SEQ ID NO: 59263 - DNA, 20 bp, Human herpesvirus 6B
aaaaatacgtaaacccctgg

SEQ ID NO: 59264 - DNA, 20 bp, Human herpesvirus 6B
gccgttatggtctgtttgat

SEQ ID NO: 59265 - DNA, 20 bp, Human herpesvirus 6B
ccgttatggtctgtttgatc

SEQ ID NO: 59266 - DNA, 20 bp, Human herpesvirus 6B
ttagccactgcacccactaa

SEQ ID NO: 59267 - DNA, 20 bp, Human herpesvirus 6B
gccactgcacccactaaaca

SEQ ID NO: 59268 - DNA, 20 bp, Human herpesvirus 6B
caaacttgcaagcctgagct

SEQ ID NO: 59269 - DNA, 20 bp, Human herpesvirus 6B
caagcctgagctcgataaag

SEQ ID NO: 59270 - DNA, 20 bp, Human herpesvirus 6B
tagtgctttatcgagctcag

SEQ ID NO: 59271 - DNA, 20 bp, Human herpesvirus 6B
gatttaaccttaggcgtacc

SEQ ID NO: 59272 - DNA, 20 bp, Human herpesvirus 6B
aaccttaggcgtaccttggt

SEQ ID NO: 59273 - DNA, 20 bp, Human herpesvirus 6B
accttaggcgtaccttggtt

SEQ ID NO: 59274 - DNA, 20 bp, Human herpesvirus 6B
ggcgtaccttggtttttatg

SEQ ID NO: 59275 - DNA, 20 bp, Human herpesvirus 6B
gtttttatgtgaacgatgag

SEQ ID NO: 59276 - DNA, 20 bp, Human herpesvirus 6B
caggaaacgttgtcgtattg

SEQ ID NO: 59277 - DNA, 20 bp, Human herpesvirus 6B
tcgtattgcatctgtcggac

SEQ ID NO: 59278 - DNA, 20 bp, Human herpesvirus 6B
catctgtcggacttccacaa

SEQ ID NO: 59279 - DNA, 20 bp, Human herpesvirus 6B
cacaaccctgatgtaataaa

SEQ ID NO: 59280 - DNA, 20 bp, Human herpesvirus 6B
cgtgtgaagggtacaggttt

SEQ ID NO: 59281 - DNA, 20 bp, Human herpesvirus 6B
aaagtcagtcctcactaaga

SEQ ID NO: 59282 - DNA, 20 bp, Human herpesvirus 6B
gggagaaaatagatcaaggg

SEQ ID NO: 59283 - DNA, 20 bp, Human herpesvirus 6B
ttagcaacttgtcgcgatgc

SEQ ID NO: 59284 - DNA, 20 bp, Human herpesvirus 6B
gcaacttgtcgcgatgccct

SEQ ID NO: 59285 - DNA, 20 bp, Human herpesvirus 6B
tcgcgatgcccttgatctat

SEQ ID NO: 59286 - DNA, 20 bp, Human herpesvirus 6B
tgtatcttgcttcccatgtc

SEQ ID NO: 59287 - DNA, 20 bp, Human herpesvirus 6B
gtatcttgcttcccatgtct

SEQ ID NO: 59288 - DNA, 20 bp, Human herpesvirus 6B
tatcttgcttcccatgtctg

SEQ ID NO: 59289 - DNA, 20 bp, Human herpesvirus 6B
cttcccatgtctgatttaat

SEQ ID NO: 59290 - DNA, 20 bp, Human herpesvirus 6B
ccatgtctgatttaattcgc

SEQ ID NO: 59291 - DNA, 20 bp, Human herpesvirus 6B
acgataaagacagggctaaa

SEQ ID NO: 59292 - DNA, 20 bp, Human herpesvirus 6B
ccttgtgtcgtctgttgtta

SEQ ID NO: 59293 - DNA, 20 bp, Human herpesvirus 6B
tgtcgtctgttgttaggacc

SEQ ID NO: 59294 - DNA, 20 bp, Human herpesvirus 6B
ttaggaccggttgcggtgcc

SEQ ID NO: 59295 - DNA, 20 bp, Human herpesvirus 6B
ggaccggttgcggtgccatg

SEQ ID NO: 59296 - DNA, 20 bp, Human herpesvirus 6B
ccgcgttcgtttagcatatg

SEQ ID NO: 59297 - DNA, 20 bp, Human herpesvirus 6B
gtttagcatatgggcgtgat

SEQ ID NO: 59298 - DNA, 20 bp, Human herpesvirus 6B
agcatatgggcgtgatcttc

SEQ ID NO: 59299 - DNA, 20 bp, Human herpesvirus 6B
gcatatgggcgtgatcttcg

SEQ ID NO: 59300 - DNA, 20 bp, Human herpesvirus 6B
gcatacgtaagaaactacgg

SEQ ID NO: 59301 - DNA, 20 bp, Human herpesvirus 6B
tgcagggtgctttgcttcag

SEQ ID NO: 59302 - DNA, 20 bp, Human herpesvirus 6B
gcttcagtggaagattctct

SEQ ID NO: 59303 - DNA, 20 bp, Human herpesvirus 6B
cttcagtggaagattctcta

SEQ ID NO: 59304 - DNA, 20 bp, Human herpesvirus 6B
agtggaagattctctaatgc

SEQ ID NO: 59305 - DNA, 20 bp, Human herpesvirus 6B
tctaatgcgaacactagtcc

SEQ ID NO: 59306 - DNA, 20 bp, Human herpesvirus 6B
gaatcccaactctttttcgc

SEQ ID NO: 59307 - DNA, 20 bp, Human herpesvirus 6B
ttcgcagatggtcttgtatt

SEQ ID NO: 59308 - DNA, 20 bp, Human herpesvirus 6B
tcgcagatggtcttgtattc

SEQ ID NO: 59309 - DNA, 20 bp, Human herpesvirus 6B
cgcagatggtcttgtattcc

SEQ ID NO: 59310 - DNA, 20 bp, Human herpesvirus 6B
gcagatggtcttgtattcca

SEQ ID NO: 59311 - DNA, 20 bp, Human herpesvirus 6B
agcgctcgcgataaagagag

SEQ ID NO: 59312 - DNA, 20 bp, Human herpesvirus 6B
tcgaggtcatggtccagatc

SEQ ID NO: 59313 - DNA, 20 bp, Human herpesvirus 6B
tagcgatcacaatcgttatt

SEQ ID NO: 59314 - DNA, 20 bp, Human herpesvirus 6B
tgatcgctataacccggatc

SEQ ID NO: 59315 - DNA, 20 bp, Human herpesvirus 6B
atcgcgagcgctgaacatag

SEQ ID NO: 59316 - DNA, 20 bp, Human herpesvirus 6B
ataatttgttttttgaacag

SEQ ID NO: 59317 - DNA, 20 bp, Human herpesvirus 6B
gttttttgaacaggtctcga

SEQ ID NO: 59318 - DNA, 20 bp, Human herpesvirus 6B
ttttttgaacaggtctcgaa

SEQ ID NO: 59319 - DNA, 20 bp, Human herpesvirus 6B
tttgaacaggtctcgaacgt

SEQ ID NO: 59320 - DNA, 20 bp, Human herpesvirus 6B
ttgaacaggtctcgaacgtc

SEQ ID NO: 59321 - DNA, 20 bp, Human herpesvirus 6B
atgcgtattctcactcaatg

SEQ ID NO: 59322 - DNA, 20 bp, Human herpesvirus 6B
tcactcaatggttgtctatg

SEQ ID NO: 59323 - DNA, 20 bp, Human herpesvirus 6B
tctatgtgtgacgtccgcat

SEQ ID NO: 59324 - DNA, 20 bp, Human herpesvirus 6B
tccggactataccatgatgc

SEQ ID NO: 59325 - DNA, 20 bp, Human herpesvirus 6B
agtgagaatacgcatcaaga

SEQ ID NO: 59326 - DNA, 20 bp, Human herpesvirus 6B
cacgcggcagatccgtctct

SEQ ID NO: 59327 - DNA, 20 bp, Human herpesvirus 6B
gttaacgggatcgtcccctt

SEQ ID NO: 59328 - DNA, 20 bp, Human herpesvirus 6B
acgggatcgtccccttggct

SEQ ID NO: 59329 - DNA, 20 bp, Human herpesvirus 6B
gctcgtgctcctacaagcgc

SEQ ID NO: 59330 - DNA, 20 bp, Human herpesvirus 6B
taggagcacgagccaagggg

SEQ ID NO: 59331 - DNA, 20 bp, Human herpesvirus 6B
gagtgggagagaacagagct

SEQ ID NO: 59332 - DNA, 20 bp, Human herpesvirus 6B
gttttccgtgtcacggcgcg

SEQ ID NO: 59333 - DNA, 20 bp, Human herpesvirus 6B
tccgtgtcacggcgcgcgca

SEQ ID NO: 59334 - DNA, 20 bp, Human herpesvirus 6B
ccgtgtcacggcgcgcgcat

SEQ ID NO: 59335 - DNA, 20 bp, Human herpesvirus 6B
cgtgtcacggcgcgcgcata

SEQ ID NO: 59336 - DNA, 20 bp, Human herpesvirus 6B
gcccgtttacatcggggtcc

SEQ ID NO: 59337 - DNA, 20 bp, Human herpesvirus 6B
acatcggggtccgcagacgc

SEQ ID NO: 59338 - DNA, 20 bp, Human herpesvirus 6B
catcggggtccgcagacgcg

SEQ ID NO: 59339 - DNA, 20 bp, Human herpesvirus 6B
tgccagggcgttgcgctgtc

SEQ ID NO: 59340 - DNA, 20 bp, Human herpesvirus 6B
cgctgtcggttccgcacaaa

SEQ ID NO: 59341 - DNA, 20 bp, Human herpesvirus 6B
gcaaggcgagggctgcagcg

SEQ ID NO: 59342 - DNA, 20 bp, Human herpesvirus 6B
caaggcgagggctgcagcgg

SEQ ID NO: 59343 - DNA, 20 bp, Human herpesvirus 6B
ctcatacgccacggggtccc

SEQ ID NO: 59344 - DNA, 20 bp, Human herpesvirus 6B
caaactccgttacgttcgac

SEQ ID NO: 59345 - DNA, 20 bp, Human herpesvirus 6B
cgttcgacgccagacggcag

SEQ ID NO: 59346 - DNA, 20 bp, Influenza A virus
aactgtataggaagctcaag

SEQ ID NO: 59347 - DNA, 20 bp, Influenza A virus
catggggccaaagaaatctc

SEQ ID NO: 59348 - DNA, 20 bp, Influenza A virus
ctttggccccatggaatgtt

SEQ ID NO: 59349 - DNA, 20 bp, Influenza A virus
tttggccccatggaatgtta

SEQ ID NO: 59350 - DNA, 20 bp, Influenza A virus
ggccccatggaatgttatct

SEQ ID NO: 59351 - DNA, 20 bp, Influenza A virus
ggatcttgcacttgatattg

SEQ ID NO: 59352 - DNA, 20 bp, Influenza A virus
cacttgatattgtggattct

SEQ ID NO: 59353 - DNA, 20 bp, Influenza A virus
atattgtggattcttgatcg

SEQ ID NO: 59354 - DNA, 20 bp, Influenza A virus
tggattcttgatcgtctttt

SEQ ID NO: 59355 - DNA, 20 bp, Influenza A virus
ttgatcgtctttttttcaaa

SEQ ID NO: 59356 - DNA, 20 bp, Influenza A virus
gcagacaatggattgggtga

SEQ ID NO: 59357 - DNA, 20 bp, Influenza A virus
cagacaatggattgggtgat

SEQ ID NO: 59358 - DNA, 20 bp, Influenza A virus
ggtgatgccccattccttga

SEQ ID NO: 59359 - DNA, 20 bp, Influenza A virus
cttgatcggctccgccgaga

SEQ ID NO: 59360 - DNA, 20 bp, Influenza A virus
atcggctccgccgagatcaa

SEQ ID NO: 59361 - DNA, 20 bp, Influenza A virus
atgctcatgcctaggcaaaa

SEQ ID NO: 59362 - DNA, 20 bp, Influenza A virus
gcgtgcgattggaccaggcg

SEQ ID NO: 59363 - DNA, 20 bp, Influenza A virus
cgtgcgattggaccaggcga

SEQ ID NO: 59364 - DNA, 20 bp, Influenza A virus
gaccaggcgatcatggaaaa

SEQ ID NO: 59365 - DNA, 20 bp, Influenza A virus
agtgtaatctttaaccgatt

SEQ ID NO: 59366 - DNA, 20 bp, Influenza A virus
gagtctctgaaaatatacag

SEQ ID NO: 59367 - DNA, 20 bp, Influenza A virus
gcttggagaaactgtgatga

SEQ ID NO: 59368 - DNA, 20 bp, Influenza A virus
gagaaactgtgatgagaatg

SEQ ID NO: 59369 - DNA, 20 bp, Influenza A virus
actacctccagagcagaaat

SEQ ID NO: 59370 - DNA, 20 bp, Influenza A virus
tcatttctgctctggaggta

SEQ ID NO: 59371 - DNA, 20 bp, Human papillomavirus type 7
cggctccacagctagaactt

SEQ ID NO: 59372 - DNA, 20 bp, Human papillomavirus type 7
aaataaagttctagctgtgg

SEQ ID NO: 59373 - DNA, 20 bp, Human papillomavirus type 7
tagctgtggagccgcaacgt

SEQ ID NO: 59374 - DNA, 20 bp, Human papillomavirus type 7
tttgggttggtttttatatg

SEQ ID NO: 59375 - DNA, 20 bp, Human papillomavirus type 7
ttgggttggtttttatatgt

SEQ ID NO: 59376 - DNA, 20 bp, Human papillomavirus type 7
agatacgctgcatatgcacc

SEQ ID NO: 59377 - DNA, 20 bp, Human papillomavirus type 7
gatacgctgcatatgcacca

SEQ ID NO: 59378 - DNA, 20 bp, Human papillomavirus type 7
acaattttagaagtgagaat

SEQ ID NO: 59379 - DNA, 20 bp, Human papillomavirus type 7
tagaagtgagaataagatgc

SEQ ID NO: 59380 - DNA, 20 bp, Human papillomavirus type 7
agaagtgagaataagatgct

SEQ ID NO: 59381 - DNA, 20 bp, Human papillomavirus type 7
caagtaaatttgcaatcatt

SEQ ID NO: 59382 - DNA, 20 bp, Human papillomavirus type 7
gcaatcatttaaaatagtaa

SEQ ID NO: 59383 - DNA, 20 bp, Human papillomavirus type 7
caatcatttaaaatagtaac

SEQ ID NO: 59384 - DNA, 20 bp, Human papillomavirus type 7
ctattttaaatgattgcaaa

SEQ ID NO: 59385 - DNA, 20 bp, Human papillomavirus type 7
taaatgattgcaaatttact

SEQ ID NO: 59386 - DNA, 20 bp, Human papillomavirus type 7
aggtacagaggatgtggggt

SEQ ID NO: 59387 - DNA, 20 bp, Human papillomavirus type 7
aggatggtttttagttgagg

SEQ ID NO: 59388 - DNA, 20 bp, Human papillomavirus type 7
ttagttgaggctgtggtaga

SEQ ID NO: 59389 - DNA, 20 bp, Human papillomavirus type 7
tagttgaggctgtggtagat

SEQ ID NO: 59390 - DNA, 20 bp, Human papillomavirus type 7
agttgaggctgtggtagata

SEQ ID NO: 59391 - DNA, 20 bp, Human papillomavirus type 7
aagtgctagaagaaagcagt

SEQ ID NO: 59392 - DNA, 20 bp, Human papillomavirus type 7
tacagcaacttagtccgcgt

SEQ ID NO: 59393 - DNA, 20 bp, Human papillomavirus type 7
gtccgcgtacacaggtggta

SEQ ID NO: 59394 - DNA, 20 bp, Human papillomavirus type 7
aaatgcaaggatttaaatgc

SEQ ID NO: 59395 - DNA, 20 bp, Human papillomavirus type 7
aatgcaaggatttaaatgct

SEQ ID NO: 59396 - DNA, 20 bp, Human papillomavirus type 7
cttgcattgtgtagatataa

SEQ ID NO: 59397 - DNA, 20 bp, Human papillomavirus type 7
cattgtgtagatataaggta

SEQ ID NO: 59398 - DNA, 20 bp, Human papillomavirus type 7
tgtagatataaggtagcaaa

SEQ ID NO: 59399 - DNA, 20 bp, Human papillomavirus type 7
ccaaaatgttaaatgtacca

SEQ ID NO: 59400 - DNA, 20 bp, Human papillomavirus type 7
aatgtaccagataatcaact

SEQ ID NO: 59401 - DNA, 20 bp, Human papillomavirus type 7
agtttaactcagatggtgca

SEQ ID NO: 59402 - DNA, 20 bp, Human papillomavirus type 7
gtttaactcagatggtgcag

SEQ ID NO: 59403 - DNA, 20 bp, Human papillomavirus type 7
aactcagatggtgcagtggg

SEQ ID NO: 59404 - DNA, 20 bp, Human papillomavirus type 7
actcagatggtgcagtgggc

SEQ ID NO: 59405 - DNA, 20 bp, Human papillomavirus type 7
ttatgcacaaatagcagata

SEQ ID NO: 59406 - DNA, 20 bp, Human papillomavirus type 7
gtgccaggaacagttgttag

SEQ ID NO: 59407 - DNA, 20 bp, Human papillomavirus type 7
tgccaggaacagttgttaga

SEQ ID NO: 59408 - DNA, 20 bp, Human papillomavirus type 7
ttagaactttatgaacaaga

SEQ ID NO: 59409 - DNA, 20 bp, Human papillomavirus type 7
gaactttatgaacaagacag

SEQ ID NO: 59410 - DNA, 20 bp, Human papillomavirus type 7
atgaacaagacagcaaacag

SEQ ID NO: 59411 - DNA, 20 bp, Human papillomavirus type 7
gcaaactactgaatataact

SEQ ID NO: 59412 - DNA, 20 bp, Human papillomavirus type 7
caaactactgaatataactt

SEQ ID NO: 59413 - DNA, 20 bp, Human papillomavirus type 7
gagccatggacgttacagga

SEQ ID NO: 59414 - DNA, 20 bp, Human papillomavirus type 7
caggacacaagtcaagaact

SEQ ID NO: 59415 - DNA, 20 bp, Human papillomavirus type 7
cagaaccaaagaaatgtttt

SEQ ID NO: 59416 - DNA, 20 bp, Human papillomavirus type 7
aaagcaacaacaaaatcagg

SEQ ID NO: 59417 - DNA, 20 bp, Human papillomavirus type 7
ctgattttgttgttgctttc

SEQ ID NO: 59418 - DNA, 20 bp, Human papillomavirus type 7
tgttgttgctttcaatatca

SEQ ID NO: 59419 - DNA, 20 bp, Human papillomavirus type 7
gttgttgctttcaatatcag

SEQ ID NO: 59420 - DNA, 20 bp, Human papillomavirus type 7
ttgttgctttcaatatcagg

SEQ ID NO: 59421 - DNA, 20 bp, Human papillomavirus type 7
tagatatatcttctactaat

SEQ ID NO: 59422 - DNA, 20 bp, Human papillomavirus type 7
agatatatcttctactaata

SEQ ID NO: 59423 - DNA, 20 bp, Human papillomavirus type 7
gatatatcttctactaatac

SEQ ID NO: 59424 - DNA, 20 bp, Human papillomavirus type 7
tactaatacagtacatgtta

SEQ ID NO: 59425 - DNA, 20 bp, Human papillomavirus type 7
catctaccacacaccataac

SEQ ID NO: 59426 - DNA, 20 bp, Human papillomavirus type 7
ccttctgttcctgcaggtac

SEQ ID NO: 59427 - DNA, 20 bp, Human papillomavirus type 7
cttctgttcctgcaggtaca

SEQ ID NO: 59428 - DNA, 20 bp, Human papillomavirus type 7
tgttcctgcaggtacaccat

SEQ ID NO: 59429 - DNA, 20 bp, Human papillomavirus type 7
ctgcaggtacaccatatttg

SEQ ID NO: 59430 - DNA, 20 bp, Human papillomavirus type 7
gcctgtgtcaccttctatac

SEQ ID NO: 59431 - DNA, 20 bp, Human papillomavirus type 7
agagtacgcttgcccgaccc

SEQ ID NO: 59432 - DNA, 20 bp, Human papillomavirus type 7
gagtacgcttgcccgaccct

SEQ ID NO: 59433 - DNA, 20 bp, Human papillomavirus type 7
cccgaccctaataaatttgg

SEQ ID NO: 59434 - DNA, 20 bp, Human papillomavirus type 7
attagggtcgggcaagcgta

SEQ ID NO: 59435 - DNA, 20 bp, Human papillomavirus type 7
ttagggtcgggcaagcgtac

SEQ ID NO: 59436 - DNA, 20 bp, Human papillomavirus type 7
tgtattgtaggctgtactcc

SEQ ID NO: 59437 - DNA, 20 bp, Human papillomavirus type 7
taggctgtactcctcctatt

SEQ ID NO: 59438 - DNA, 20 bp, Human papillomavirus type 7
gagaatattggggtatgggt

SEQ ID NO: 59439 - DNA, 20 bp, Human papillomavirus type 7
gggtatgggtacaccgtgca

SEQ ID NO: 59440 - DNA, 20 bp, Human papillomavirus type 7
taaagtgtctcctggtgact

SEQ ID NO: 59441 - DNA, 20 bp, Human papillomavirus type 7
ctcttctgggtcagtcaccc

SEQ ID NO: 59442 - DNA, 20 bp, Human papillomavirus type 7
tgggtcagtcacccccaaac

SEQ ID NO: 59443 - DNA, 20 bp, Human papillomavirus type 7
tgtatgtgtgtgtgtgtgat

SEQ ID NO: 59444 - DNA, 20 bp, Human papillomavirus type 7
cactcccttatgtgttgtta

SEQ ID NO: 59445 - DNA, 20 bp, Human papillomavirus type 7
tgttttcttacgtttggggg

SEQ ID NO: 59446 - DNA, 20 bp, Human papillomavirus type 7
gggtgaggttgccacacctt

SEQ ID NO: 59447 - DNA, 20 bp, Human papillomavirus type 7
ccacacctttaattacactt

SEQ ID NO: 59448 - DNA, 20 bp, Human papillomavirus type 7
aattacacttttattgcact

SEQ ID NO: 59449 - DNA, 20 bp, Human papillomavirus type 7
attacacttttattgcactg

SEQ ID NO: 59450 - DNA, 20 bp, Human papillomavirus type 7
cacttttattgcactgttac

SEQ ID NO: 59451 - DNA, 20 bp, Human papillomavirus type 53
tttgaaaatacagaagagcg

SEQ ID NO: 59452 - DNA, 20 bp, Human papillomavirus type 53
gaaaatacagaagagcgacc

SEQ ID NO: 59453 - DNA, 20 bp, Human papillomavirus type 53
aaaatacagaagagcgacca

SEQ ID NO: 59454 - DNA, 20 bp, Human papillomavirus type 53
caccagctatgtgaagttgt

SEQ ID NO: 59455 - DNA, 20 bp, Human papillomavirus type 53
tgaataaaccattgctggag

SEQ ID NO: 59456 - DNA, 20 bp, Human papillomavirus type 53
agatattacaattgttcagt

SEQ ID NO: 59457 - DNA, 20 bp, Human papillomavirus type 53
caattgttcagtgtacgggg

SEQ ID NO: 59458 - DNA, 20 bp, Human papillomavirus type 53
ttcagtgtacggggctagcc

SEQ ID NO: 59459 - DNA, 20 bp, Human papillomavirus type 53
agtgtacggggctagcctgg

SEQ ID NO: 59460 - DNA, 20 bp, Human papillomavirus type 53
tctgatttatcaataaggtg

SEQ ID NO: 59461 - DNA, 20 bp, Human papillomavirus type 53
cacaatatattatagaactt

SEQ ID NO: 59462 - DNA, 20 bp, Human papillomavirus type 53
tagaacttataccacaaact

SEQ ID NO: 59463 - DNA, 20 bp, Human papillomavirus type 53
taccacaaactgagattgac

SEQ ID NO: 59464 - DNA, 20 bp, Human papillomavirus type 53
acctgcaatgccatgagcaa

SEQ ID NO: 59465 - DNA, 20 bp, Human papillomavirus type 53
aacagctcagaggatgagga

SEQ ID NO: 59466 - DNA, 20 bp, Human papillomavirus type 53
catgccaaaacacacatgca

SEQ ID NO: 59467 - DNA, 20 bp, Human papillomavirus type 53
aaacgaaagtatttaggcag

SEQ ID NO: 59468 - DNA, 20 bp, Human papillomavirus type 53
aggcagtccattaggtgata

SEQ ID NO: 59469 - DNA, 20 bp, Human papillomavirus type 53
ggcagtccattaggtgatat

SEQ ID NO: 59470 - DNA, 20 bp, Human papillomavirus type 53
ggtgatattagtaatcagca

SEQ ID NO: 59471 - DNA, 20 bp, Human papillomavirus type 53
ctacattttaatatatcttg

SEQ ID NO: 59472 - DNA, 20 bp, Human papillomavirus type 53
taatatatcttgtatttgtt

SEQ ID NO: 59473 - DNA, 20 bp, Human papillomavirus type 53
aatatatcttgtatttgttg

SEQ ID NO: 59474 - DNA, 20 bp, Human papillomavirus type 53
atatatcttgtatttgttgc

SEQ ID NO: 59475 - DNA, 20 bp, Human papillomavirus type 53
tatttgttgcagtggcatta

SEQ ID NO: 59476 - DNA, 20 bp, Human papillomavirus type 53
caacatagctttgaggactg

SEQ ID NO: 59477 - DNA, 20 bp, Human papillomavirus type 53
gaggactgtcaatttgaact

SEQ ID NO: 59478 - DNA, 20 bp, Human papillomavirus type 53
aggactgtcaatttgaacta

SEQ ID NO: 59479 - DNA, 20 bp, Human papillomavirus type 53
gaactatctaaaatggtgca

SEQ ID NO: 59480 - DNA, 20 bp, Human papillomavirus type 53
aactatctaaaatggtgcag

SEQ ID NO: 59481 - DNA, 20 bp, Human papillomavirus type 53
ctaaggtatcaaggggtcga

SEQ ID NO: 59482 - DNA, 20 bp, Human papillomavirus type 53
atttcatttttaagttattt

SEQ ID NO: 59483 - DNA, 20 bp, Human papillomavirus type 53
tttcatttttaagttatttt

SEQ ID NO: 59484 - DNA, 20 bp, Human papillomavirus type 53
catttttaagttattttaaa

SEQ ID NO: 59485 - DNA, 20 bp, Human papillomavirus type 53
atttttaagttattttaaat

SEQ ID NO: 59486 - DNA, 20 bp, Human papillomavirus type 53
aataatgcaaactggaaatg

SEQ ID NO: 59487 - DNA, 20 bp, Human papillomavirus type 53
ttttgaaaggacatggtcca

SEQ ID NO: 59488 - DNA, 20 bp, Human papillomavirus type 53
tttgaaaggacatggtccag

SEQ ID NO: 59489 - DNA, 20 bp, Human papillomavirus type 53
ttgaaaggacatggtccaga

SEQ ID NO: 59490 - DNA, 20 bp, Human papillomavirus type 53
tgaaaggacatggtccagat

SEQ ID NO: 59491 - DNA, 20 bp, Human papillomavirus type 53
tgcagtaagctatgagggca

SEQ ID NO: 59492 - DNA, 20 bp, Human papillomavirus type 53
tatacatgacggccataaaa

SEQ ID NO: 59493 - DNA, 20 bp, Human papillomavirus type 53
tacaaactttaaagacgagg

SEQ ID NO: 59494 - DNA, 20 bp, Human papillomavirus type 53
aaagacgaggccaccaaata

SEQ ID NO: 59495 - DNA, 20 bp, Human papillomavirus type 53
aagacgaggccaccaaatat

SEQ ID NO: 59496 - DNA, 20 bp, Human papillomavirus type 53
tgggacgttttcccggccgc

SEQ ID NO: 59497 - DNA, 20 bp, Human papillomavirus type 53
tcccggccgcagggatgatg

SEQ ID NO: 59498 - DNA, 20 bp, Human papillomavirus type 53
cccggccgcagggatgatga

SEQ ID NO: 59499 - DNA, 20 bp, Human papillomavirus type 53
ccggccgcagggatgatgag

SEQ ID NO: 59500 - DNA, 20 bp, Human papillomavirus type 53
gttactgtatcatccaccta

SEQ ID NO: 59501 - DNA, 20 bp, Human papillomavirus type 53
ttactgtatcatccacctat

SEQ ID NO: 59502 - DNA, 20 bp, Human papillomavirus type 53
ctgtatcatccacctatcat

SEQ ID NO: 59503 - DNA, 20 bp, Human papillomavirus type 53
gacaaatgtaaactgtgctg

SEQ ID NO: 59504 - DNA, 20 bp, Human papillomavirus type 53
tattactgttgtatataaag

SEQ ID NO: 59505 - DNA, 20 bp, Human papillomavirus type 53
caaccattgtgttgtgtgtt

SEQ ID NO: 59506 - DNA, 20 bp, Human papillomavirus type 53
tgttgtgtgttagttttgtg

SEQ ID NO: 59507 - DNA, 20 bp, Human papillomavirus type 53
tgtgttagttttgtgttttt

SEQ ID NO: 59508 - DNA, 20 bp, Human papillomavirus type 53
gttttgtgtttttgctttgc

SEQ ID NO: 59509 - DNA, 20 bp, Human papillomavirus type 53
tgtgtttttgctttgctgct

SEQ ID NO: 59510 - DNA, 20 bp, Human papillomavirus type 53
gtagaccctcctgttattga

SEQ ID NO: 59511 - DNA, 20 bp, Human papillomavirus type 53
tagaccctcctgttattgag

SEQ ID NO: 59512 - DNA, 20 bp, Human papillomavirus type 53
ttgaggtcccccaaactggt

SEQ ID NO: 59513 - DNA, 20 bp, Human papillomavirus type 53
aggtcccccaaactggtgag

SEQ ID NO: 59514 - DNA, 20 bp, Human papillomavirus type 53
ataagtaccccaacatctgg

SEQ ID NO: 59515 - DNA, 20 bp, Human papillomavirus type 53
accttttcaccatcaggtgt

SEQ ID NO: 59516 - DNA, 20 bp, Human papillomavirus type 53
tcaccatcaggtgtggcacc

SEQ ID NO: 59517 - DNA, 20 bp, Human papillomavirus type 53
caccatcaggtgtggcacct

SEQ ID NO: 59518 - DNA, 20 bp, Human papillomavirus type 53
accatcaggtgtggcacctg

SEQ ID NO: 59519 - DNA, 20 bp, Human papillomavirus type 53
tttagacattgtggctttac

SEQ ID NO: 59520 - DNA, 20 bp, Human papillomavirus type 53
tacagggctccacatttgcg

SEQ ID NO: 59521 - DNA, 20 bp, Human papillomavirus type 53
gcgttatggcctgtttattt

SEQ ID NO: 59522 - DNA, 20 bp, Human papillomavirus type 53
cgttatggcctgtttatttt

SEQ ID NO: 59523 - DNA, 20 bp, Human papillomavirus type 53
tggcctgtttattttttgaa

SEQ ID NO: 59524 - DNA, 20 bp, Human papillomavirus type 53
attttttgaaacgtaggcgt

SEQ ID NO: 59525 - DNA, 20 bp, Human papillomavirus type 53
gtcgcctcctgttgccacta

SEQ ID NO: 59526 - DNA, 20 bp, Human papillomavirus type 53
tcgcctcctgttgccactag

SEQ ID NO: 59527 - DNA, 20 bp, Human papillomavirus type 53
ccactagcttagaggacaaa

SEQ ID NO: 59528 - DNA, 20 bp, Human papillomavirus type 53
gaggacaaatacagatatgt

SEQ ID NO: 59529 - DNA, 20 bp, Human papillomavirus type 53
tgacaggttatagctgcact

SEQ ID NO: 59530 - DNA, 20 bp, Human papillomavirus type 53
gtcacttactgtaggctgcc

SEQ ID NO: 59531 - DNA, 20 bp, Human papillomavirus type 53
ctgtaggctgccaactatgc

SEQ ID NO: 59532 - DNA, 20 bp, Human papillomavirus type 53
tacctgcataccttagtgct

SEQ ID NO: 59533 - DNA, 20 bp, Human papillomavirus type 53
acctgcataccttagtgctt

SEQ ID NO: 59534 - DNA, 20 bp, Human papillomavirus type 53
cctgcataccttagtgcttt

SEQ ID NO: 59535 - DNA, 20 bp, Human rhinovirus 1
ttccggtaactttgtacgcc

SEQ ID NO: 59536 - DNA, 20 bp, Human rhinovirus 1
cggtaactttgtacgccagt

SEQ ID NO: 59537 - DNA, 20 bp, Human rhinovirus 1
gtacgccagtttttccctcc

SEQ ID NO: 59538 - DNA, 20 bp, Human rhinovirus 1
tacgccagtttttccctccc

SEQ ID NO: 59539 - DNA, 20 bp, Human rhinovirus 1
ttccctcccctccccatcct

SEQ ID NO: 59540 - DNA, 20 bp, Human rhinovirus 1
cagatgaggctggacattcc

SEQ ID NO: 59541 - DNA, 20 bp, Human rhinovirus 1
cccactggtaacagtggtcc

SEQ ID NO: 59542 - DNA, 20 bp, Human rhinovirus 1
acaccctgtccgatctttgg

SEQ ID NO: 59543 - DNA, 20 bp, Human rhinovirus 1
ggcttcacacctcatgagag

SEQ ID NO: 59544 - DNA, 20 bp, Human rhinovirus 1
gcttcacacctcatgagagg

SEQ ID NO: 59545 - DNA, 20 bp, Human rhinovirus 1
gaaaaggggatcccaacact

SEQ ID NO: 59546 - DNA, 20 bp, Human rhinovirus 1
aggcttgtggctattcagac

SEQ ID NO: 59547 - DNA, 20 bp, Human rhinovirus 1
tggctattcagacaggatta

SEQ ID NO: 59548 - DNA, 20 bp, Human rhinovirus 1
agacaggattatgcaaataa

SEQ ID NO: 59549 - DNA, 20 bp, Human rhinovirus 1
tgcaaataaccagaggagat

SEQ ID NO: 59550 - DNA, 20 bp, Human rhinovirus 1
tctggtgcaagagcaaaaaa

SEQ ID NO: 59551 - DNA, 20 bp, Human rhinovirus 1
ctggtgcaagagcaaaaaac

SEQ ID NO: 59552 - DNA, 20 bp, Human rhinovirus 1
tggtgcaagagcaaaaaaca

SEQ ID NO: 59553 - DNA, 20 bp, Human rhinovirus 1
aacaaggattacctgtatat

SEQ ID NO: 59554 - DNA, 20 bp, Human rhinovirus 1
cctgtatatataactccagg

SEQ ID NO: 59555 - DNA, 20 bp, Human rhinovirus 1
tcaataaaagtagacattac

SEQ ID NO: 59556 - DNA, 20 bp, Human rhinovirus 1
caataaaagtagacattaca

SEQ ID NO: 59557 - DNA, 20 bp, Human rhinovirus 1
aataaaagtagacattacat

SEQ ID NO: 59558 - DNA, 20 bp, Human rhinovirus 1
catcacagcctttggctaca

SEQ ID NO: 59559 - DNA, 20 bp, Human rhinovirus 1
ggctacaactttaattgggg

SEQ ID NO: 59560 - DNA, 20 bp, Human rhinovirus 1
tgtgggatgttggattgcag

SEQ ID NO: 59561 - DNA, 20 bp, Human rhinovirus 1
gattgcagtctactatatct

SEQ ID NO: 59562 - DNA, 20 bp, Human rhinovirus 1
cagtctactatatctcttgt

SEQ ID NO: 59563 - DNA, 20 bp, Human rhinovirus 1
ttgtaccatgggtgagtgcc

SEQ ID NO: 59564 - DNA, 20 bp, Human rhinovirus 1
taccatgggtgagtgccagc

SEQ ID NO: 59565 - DNA, 20 bp, Human rhinovirus 1
tgtccacatctcaagaataa

SEQ ID NO: 59566 - DNA, 20 bp, Human rhinovirus 1
attacactgactataatgga

SEQ ID NO: 59567 - DNA, 20 bp, Human rhinovirus 1
cactgactataatggacagg

SEQ ID NO: 59568 - DNA, 20 bp, Human rhinovirus 1
cacaaaatggaaaatcacac

SEQ ID NO: 59569 - DNA, 20 bp, Human rhinovirus 1
acaaaatggaaaatcacact

SEQ ID NO: 59570 - DNA, 20 bp, Human rhinovirus 1
aaaaagaaacgatttctcat

SEQ ID NO: 59571 - DNA, 20 bp, Human rhinovirus 1
ctcatggcaatcaggcacca

SEQ ID NO: 59572 - DNA, 20 bp, Human rhinovirus 1
tcatggcaatcaggcaccaa

SEQ ID NO: 59573 - DNA, 20 bp, Human rhinovirus 1
tggcaacatggacagccatt

SEQ ID NO: 59574 - DNA, 20 bp, Human rhinovirus 1
cctagattttctttaccatt

SEQ ID NO: 59575 - DNA, 20 bp, Human rhinovirus 1
atagatcttagacaatttca

SEQ ID NO: 59576 - DNA, 20 bp, Human rhinovirus 1
tagatcttagacaatttcac

SEQ ID NO: 59577 - DNA, 20 bp, Human rhinovirus 1
gacaatttcactgtgctgag

SEQ ID NO: 59578 - DNA, 20 bp, Human rhinovirus 1
cactgtgctgaggaacaagg

SEQ ID NO: 59579 - DNA, 20 bp, Human rhinovirus 1
actgtgctgaggaacaaggc

SEQ ID NO: 59580 - DNA, 20 bp, Human rhinovirus 1
acactaattggttgcaatgg

SEQ ID NO: 59581 - DNA, 20 bp, Human rhinovirus 1
gttgcaatggttcaccatgg

SEQ ID NO: 59582 - DNA, 20 bp, Human rhinovirus 1
caatggttcaccatggagat

SEQ ID NO: 59583 - DNA, 20 bp, Human rhinovirus 1
accatggagatttctcaaag

SEQ ID NO: 59584 - DNA, 20 bp, Human rhinovirus 1
ctcaaagaaaagttttgcaa

SEQ ID NO: 59585 - DNA, 20 bp, Human rhinovirus 1
acaatcacattttggaagaa

SEQ ID NO: 59586 - DNA, 20 bp, Human rhinovirus 1
caatcacattttggaagaag

SEQ ID NO: 59587 - DNA, 20 bp, Human rhinovirus 1
tggaagaagacaaaagaagg

SEQ ID NO: 59588 - DNA, 20 bp, Human rhinovirus 1
ggaagaagacaaaagaagga

SEQ ID NO: 59589 - DNA, 20 bp, Human rhinovirus 1
gaagaagacaaaagaaggag

SEQ ID NO: 59590 - DNA, 20 bp, Human papillomavirus type 166
ggcagtgatctttatccagg

SEQ ID NO: 59591 - DNA, 20 bp, Human papillomavirus type 166
gcagtgatctttatccaggt

SEQ ID NO: 59592 - DNA, 20 bp, Human papillomavirus type 166
atccaggtaagtacaagctg

SEQ ID NO: 59593 - DNA, 20 bp, Human papillomavirus type 166
tccaggtaagtacaagctga

SEQ ID NO: 59594 - DNA, 20 bp, Human papillomavirus type 166
atgagtcaaaaggttggcac

SEQ ID NO: 59595 - DNA, 20 bp, Human papillomavirus type 166
ttaaggcttcagcgcttgaa

SEQ ID NO: 59596 - DNA, 20 bp, Human papillomavirus type 166
aggcttcagcgcttgaaggt

SEQ ID NO: 59597 - DNA, 20 bp, Human papillomavirus type 166
agcgcttgaaggtcttttgc

SEQ ID NO: 59598 - DNA, 20 bp, Human papillomavirus type 166
aaggtcttttgcataaatct

SEQ ID NO: 59599 - DNA, 20 bp, Human papillomavirus type 166
tgcataaatctttacagagc

SEQ ID NO: 59600 - DNA, 20 bp, Human papillomavirus type 166
gatacatttgaagatatttt

SEQ ID NO: 59601 - DNA, 20 bp, Human papillomavirus type 166
gaagatattttcgatgaaag

SEQ ID NO: 59602 - DNA, 20 bp, Human papillomavirus type 166
aagatattttcgatgaaagt

SEQ ID NO: 59603 - DNA, 20 bp, Human papillomavirus type 166
tcgatgaaagtacagatggt

SEQ ID NO: 59604 - DNA, 20 bp, Human papillomavirus type 166
cgatgaaagtacagatggtt

SEQ ID NO: 59605 - DNA, 20 bp, Human papillomavirus type 166
ggttacggttgtatttaatg

SEQ ID NO: 59606 - DNA, 20 bp, Human papillomavirus type 166
cggttgtatttaatgcttta

SEQ ID NO: 59607 - DNA, 20 bp, Human papillomavirus type 166
tatttaatgctttagaagaa

SEQ ID NO: 59608 - DNA, 20 bp, Human papillomavirus type 166
aatgctttagaagaagtaat

SEQ ID NO: 59609 - DNA, 20 bp, Human papillomavirus type 166
atgctttagaagaagtaatt

SEQ ID NO: 59610 - DNA, 20 bp, Human papillomavirus type 166
tttaaattgtaataatcaag

SEQ ID NO: 59611 - DNA, 20 bp, Human papillomavirus type 166
ttaaattgtaataatcaagt

SEQ ID NO: 59612 - DNA, 20 bp, Human papillomavirus type 166
taaattgtaataatcaagta

SEQ ID NO: 59613 - DNA, 20 bp, Human papillomavirus type 166
aaattgtaataatcaagtaa

SEQ ID NO: 59614 - DNA, 20 bp, Human papillomavirus type 166
aattgtaataatcaagtaaa

SEQ ID NO: 59615 - DNA, 20 bp, Human papillomavirus type 166
atgcaaaacatagagtccca

SEQ ID NO: 59616 - DNA, 20 bp, Human papillomavirus type 166
aactacctccattagttgtt

SEQ ID NO: 59617 - DNA, 20 bp, Human papillomavirus type 166
gttgttacaaccaacttaga

SEQ ID NO: 59618 - DNA, 20 bp, Human papillomavirus type 166
ttacaaccaacttagatgta

SEQ ID NO: 59619 - DNA, 20 bp, Human papillomavirus type 166
caaccaacttagatgtaaaa

SEQ ID NO: 59620 - DNA, 20 bp, Human papillomavirus type 166
gaatgctgatgttgttaaga

SEQ ID NO: 59621 - DNA, 20 bp, Human papillomavirus type 166
ttaagaagtttaagtaaatc

SEQ ID NO: 59622 - DNA, 20 bp, Human papillomavirus type 166
agaagtttaagtaaatcaca

SEQ ID NO: 59623 - DNA, 20 bp, Human papillomavirus type 166
aagtaaatcacagtatgcct

SEQ ID NO: 59624 - DNA, 20 bp, Human papillomavirus type 166
agtaaatcacagtatgcctc

SEQ ID NO: 59625 - DNA, 20 bp, Human papillomavirus type 166
ccctgagaggaggcctacct

SEQ ID NO: 59626 - DNA, 20 bp, Human papillomavirus type 166
gacgacgacaaggaggagaa

SEQ ID NO: 59627 - DNA, 20 bp, Human papillomavirus type 166
tccttgttctcctccttgtc

SEQ ID NO: 59628 - DNA, 20 bp, Human papillomavirus type 166
ttctcctccttgtcgtcgtc

SEQ ID NO: 59629 - DNA, 20 bp, Human papillomavirus type 166
tcctccttgtcgtcgtcgaa

SEQ ID NO: 59630 - DNA, 20 bp, Human papillomavirus type 166
acatatggtcaattaaatag

SEQ ID NO: 59631 - DNA, 20 bp, Human papillomavirus type 166
aatagcttataatgtacaga

SEQ ID NO: 59632 - DNA, 20 bp, Human papillomavirus type 166
taatgtacagagcaggtaga

SEQ ID NO: 59633 - DNA, 20 bp, Human papillomavirus type 166
tgcagaggagctatataaac

SEQ ID NO: 59634 - DNA, 20 bp, Human papillomavirus type 166
tattttatttttaacatcag

SEQ ID NO: 59635 - DNA, 20 bp, Human papillomavirus type 166
tatcgtctacagatgagtct

SEQ ID NO: 59636 - DNA, 20 bp, Human papillomavirus type 166
tgggggtggaattggttgca

SEQ ID NO: 59637 - DNA, 20 bp, Human papillomavirus type 166
gggggtggaattggttgcac

SEQ ID NO: 59638 - DNA, 20 bp, Human papillomavirus type 166
ggggtggaattggttgcaca

SEQ ID NO: 59639 - DNA, 20 bp, Human papillomavirus type 166
gttgcacatctagtactgca

SEQ ID NO: 59640 - DNA, 20 bp, Human papillomavirus type 166
agagatattagagtattaca

SEQ ID NO: 59641 - DNA, 20 bp, Human papillomavirus type 166
gagatattagagtattacat

SEQ ID NO: 59642 - DNA, 20 bp, Human papillomavirus type 166
gagtattacatagaccttcc

SEQ ID NO: 59643 - DNA, 20 bp, Human papillomavirus type 166
catagaccttcctattttac

SEQ ID NO: 59644 - DNA, 20 bp, Human papillomavirus type 166
ctattttacaaccgataccg

SEQ ID NO: 59645 - DNA, 20 bp, Human papillomavirus type 166
ctacaaagcagcaaaccatt

SEQ ID NO: 59646 - DNA, 20 bp, Human papillomavirus type 166
taccatcacaaacagagcca

SEQ ID NO: 59647 - DNA, 20 bp, Human papillomavirus type 166
ttatagatttattttcagat

SEQ ID NO: 59648 - DNA, 20 bp, Human papillomavirus type 166
tagatttattttcagatgac

SEQ ID NO: 59649 - DNA, 20 bp, Human papillomavirus type 166
attttcagatgacttttact

SEQ ID NO: 59650 - DNA, 20 bp, Human papillomavirus type 166
catgcacaggacatccttat

SEQ ID NO: 59651 - DNA, 20 bp, Human papillomavirus type 166
atgcacaggacatccttatt

SEQ ID NO: 59652 - DNA, 20 bp, Human papillomavirus type 166
tttcaataaatattcagatg

SEQ ID NO: 59653 - DNA, 20 bp, Human papillomavirus type 166
caataaatattcagatgttg

SEQ ID NO: 59654 - DNA, 20 bp, Human papillomavirus type 166
aataaatattcagatgttga

SEQ ID NO: 59655 - DNA, 20 bp, Human papillomavirus type 166
caatggaaggtactgactat

SEQ ID NO: 59656 - DNA, 20 bp, Human papillomavirus type 166
catagctaagcaggataata

SEQ ID NO: 59657 - DNA, 20 bp, Human papillomavirus type 166
cttcccacatttattataca

SEQ ID NO: 59658 - DNA, 20 bp, Human papillomavirus type 166
ccacatttattatacaacac

SEQ ID NO: 59659 - DNA, 20 bp, Human papillomavirus type 166
attatacaacaccgagtggc

SEQ ID NO: 59660 - DNA, 20 bp, Human papillomavirus type 166
cgcagagtataaattctggg

SEQ ID NO: 59661 - DNA, 20 bp, Human papillomavirus type 166
tgggacgttgatttaacaga

SEQ ID NO: 59662 - DNA, 20 bp, Human papillomavirus type 166
atttaacagagaaatttacc

SEQ ID NO: 59663 - DNA, 20 bp, Human papillomavirus type 166
aacagagaaatttacctctg

SEQ ID NO: 59664 - DNA, 20 bp, Human papillomavirus type 166
acagagaaatttacctctga

SEQ ID NO: 59665 - DNA, 20 bp, Human rhinovirus C
gaggggaagccatttaagtg

SEQ ID NO: 59666 - DNA, 20 bp, Human rhinovirus C
aggggaagccatttaagtga

SEQ ID NO: 59667 - DNA, 20 bp, Human rhinovirus C
tcacttaaatggcttcccct

SEQ ID NO: 59668 - DNA, 20 bp, Human rhinovirus C
aatggcttcccctcaaagag

SEQ ID NO: 59669 - DNA, 20 bp, Human rhinovirus C
ccctcaaagaggggcaggca

SEQ ID NO: 59670 - DNA, 20 bp, Human rhinovirus C
gggtgtccgtgtttcctgtt

SEQ ID NO: 59671 - DNA, 20 bp, Human rhinovirus C
ggtgtccgtgtttcctgttt

SEQ ID NO: 59672 - DNA, 20 bp, Human rhinovirus C
cctgttttctttaaatactt

SEQ ID NO: 59673 - DNA, 20 bp, Human rhinovirus C
ctgttttctttaaatacttg

SEQ ID NO: 59674 - DNA, 20 bp, Human rhinovirus C
tctttaaatacttgcttatg

SEQ ID NO: 59675 - DNA, 20 bp, Human rhinovirus C
caaatccagctttaatgtca

SEQ ID NO: 59676 - DNA, 20 bp, Human rhinovirus C
aatgtcaccaactgttgaag

SEQ ID NO: 59677 - DNA, 20 bp, Human rhinovirus C
atgtcaccaactgttgaagc

SEQ ID NO: 59678 - DNA, 20 bp, Human rhinovirus C
aagcatgtgggatgtccgat

SEQ ID NO: 59679 - DNA, 20 bp, Human rhinovirus C
aacaaattactatcgggaat

SEQ ID NO: 59680 - DNA, 20 bp, Human rhinovirus C
cctgattgccttaaagatat

SEQ ID NO: 59681 - DNA, 20 bp, Human rhinovirus C
ccttaaagatatgggcatct

SEQ ID NO: 59682 - DNA, 20 bp, Human rhinovirus C
aagatatgggcatcttcggg

SEQ ID NO: 59683 - DNA, 20 bp, Human rhinovirus C
gggcaaaatctgtaccatca

SEQ ID NO: 59684 - DNA, 20 bp, Human rhinovirus C
ggtaggtcagggtacataat

SEQ ID NO: 59685 - DNA, 20 bp, Human rhinovirus C
tttaattgtaatgggaccct

SEQ ID NO: 59686 - DNA, 20 bp, Human rhinovirus C
aattgtaatgggaccctgct

SEQ ID NO: 59687 - DNA, 20 bp, Human rhinovirus C
attgtaatgggaccctgctt

SEQ ID NO: 59688 - DNA, 20 bp, Human rhinovirus C
taatgggaccctgcttggta

SEQ ID NO: 59689 - DNA, 20 bp, Human rhinovirus C
gtaacatcactatattccca

SEQ ID NO: 59690 - DNA, 20 bp, Human rhinovirus C
ccaacacggctgccaagtgg

SEQ ID NO: 59691 - DNA, 20 bp, Human rhinovirus C
ctcacaactgaggacgagca

SEQ ID NO: 59692 - DNA, 20 bp, Human rhinovirus C
tcacaactgaggacgagcag

SEQ ID NO: 59693 - DNA, 20 bp, Human rhinovirus C
gccgactgctcgtcctcagt

SEQ ID NO: 59694 - DNA, 20 bp, Human rhinovirus C
tgagaaattgttgagatcca

SEQ ID NO: 59695 - DNA, 20 bp, Human rhinovirus C
tgatacccatggacattagc

SEQ ID NO: 59696 - DNA, 20 bp, Human rhinovirus C
gcaacactctcttttctacc

SEQ ID NO: 59697 - DNA, 20 bp, Human rhinovirus C
tctaccactttactaggtga

SEQ ID NO: 59698 - DNA, 20 bp, Human rhinovirus C
ctaccactttactaggtgaa

SEQ ID NO: 59699 - DNA, 20 bp, Human rhinovirus C
taccactttactaggtgaag

SEQ ID NO: 59700 - DNA, 20 bp, Human rhinovirus C
gactcaaaacccagttgagg

SEQ ID NO: 59701 - DNA, 20 bp, Human rhinovirus C
actcaaaacccagttgagga

SEQ ID NO: 59702 - DNA, 20 bp, Human rhinovirus C
aggactacatagacaaggtg

SEQ ID NO: 59703 - DNA, 20 bp, Human rhinovirus C
aaccaagtgctttgggcgct

SEQ ID NO: 59704 - DNA, 20 bp, Human rhinovirus C
gggcgctatggaaattgggg

SEQ ID NO: 59705 - DNA, 20 bp, Human rhinovirus C
tgcaaaatgggatataaact

SEQ ID NO: 59706 - DNA, 20 bp, Human rhinovirus C
gcaaaatgggatataaactt

SEQ ID NO: 59707 - DNA, 20 bp, Human rhinovirus C
caaaatgggatataaacttc

SEQ ID NO: 59708 - DNA, 20 bp, Human rhinovirus C
caagagcatgcacaagtcag

SEQ ID NO: 59709 - DNA, 20 bp, Human rhinovirus C
gaaatgtttacatatgctag

SEQ ID NO: 59710 - DNA, 20 bp, Human rhinovirus C
actggattgggttcagctta

SEQ ID NO: 59711 - DNA, 20 bp, Human rhinovirus C
ggttcagcttattatatgtt

SEQ ID NO: 59712 - DNA, 20 bp, Human rhinovirus C
agcttattatatgttttatg

SEQ ID NO: 59713 - DNA, 20 bp, Human rhinovirus C
ttatatgttttatgatggtt

SEQ ID NO: 59714 - DNA, 20 bp, Human rhinovirus C
tatgttttatgatggttatg

SEQ ID NO: 59715 - DNA, 20 bp, Human rhinovirus C
agaaaccagatgacactact

SEQ ID NO: 59716 - DNA, 20 bp, Human rhinovirus C
attaaccacaggactgatat

SEQ ID NO: 59717 - DNA, 20 bp, Human rhinovirus C
ttaaccacaggactgatata

SEQ ID NO: 59718 - DNA, 20 bp, Human rhinovirus C
accacaggactgatataaaa

SEQ ID NO: 59719 - DNA, 20 bp, Human rhinovirus C
gtccatacagccactatgat

SEQ ID NO: 59720 - DNA, 20 bp, Human rhinovirus C
agatagatatataccagtta

SEQ ID NO: 59721 - DNA, 20 bp, Human rhinovirus C
gatagatatataccagttaa

SEQ ID NO: 59722 - DNA, 20 bp, Human rhinovirus C
aattagaagcacacgactgg

SEQ ID NO: 59723 - DNA, 20 bp, Human rhinovirus C
gaagcacacgactggtatca

SEQ ID NO: 59724 - DNA, 20 bp, Human rhinovirus C
ttacccacagcacatccagt

SEQ ID NO: 59725 - DNA, 20 bp, Human rhinovirus C
aggactatgtgacacaatta

SEQ ID NO: 59726 - DNA, 20 bp, Human rhinovirus C
gggagtgcctttggtagcgg

SEQ ID NO: 59727 - DNA, 20 bp, Human rhinovirus C
ggtagcggtttcactgacac

SEQ ID NO: 59728 - DNA, 20 bp, Human rhinovirus C
gtagcggtttcactgacaca

SEQ ID NO: 59729 - DNA, 20 bp, Human rhinovirus C
cactgacacacttaaagacc

SEQ ID NO: 59730 - DNA, 20 bp, Human rhinovirus C
ctcaaggaccggttatgtca

SEQ ID NO: 59731 - DNA, 20 bp, Human rhinovirus C
tcaaggaccggttatgtcag

SEQ ID NO: 59732 - DNA, 20 bp, Human rhinovirus C
tgtcagtggttaaacatcac

SEQ ID NO: 59733 - DNA, 20 bp, Human rhinovirus C
aacatcactagaccgccaag

SEQ ID NO: 59734 - DNA, 20 bp, Human rhinovirus C
aagaaattcactgaatgctg

SEQ ID NO: 59735 - DNA, 20 bp, Human rhinovirus C
actcccttcctccagaccct

SEQ ID NO: 59736 - DNA, 20 bp, Human rhinovirus C
ctcccttcctccagacccta

SEQ ID NO: 59737 - DNA, 20 bp, Human rhinovirus C
ctccagaccctaaacatttt

SEQ ID NO: 59738 - DNA, 20 bp, Human rhinovirus C
tgatgggtatgatcaacaag

SEQ ID NO: 59739 - DNA, 20 bp, Human rhinovirus C
gatgggtatgatcaacaaga

SEQ ID NO: 59740 - DNA, 20 bp, Human rhinovirus C
acaggcgcttctacttagat

SEQ ID NO: 59741 - DNA, 20 bp, Human rhinovirus C
tacttagatttagatcttaa

SEQ ID NO: 59742 - DNA, 20 bp, Human rhinovirus C
gatttagatcttaagatctt

SEQ ID NO: 59743 - DNA, 20 bp, Human rhinovirus C
agatcttaagatcttgcaag

SEQ ID NO: 59744 - DNA, 20 bp, Human rhinovirus C
gatcttaagatcttgcaagg

SEQ ID NO: 59745 - DNA, 20 bp, Human rhinovirus C
gcaataatttaacagctata

SEQ ID NO: 59746 - DNA, 20 bp, Human rhinovirus C
aacagctatatttcagggct

SEQ ID NO: 59747 - DNA, 20 bp, Human rhinovirus C
acagctatatttcagggctt

SEQ ID NO: 59748 - DNA, 20 bp, Human rhinovirus C
cagggcttgggtgataagga

SEQ ID NO: 59749 - DNA, 20 bp, Human rhinovirus C
agggcttgggtgataaggaa

SEQ ID NO: 59750 - DNA, 20 bp, Human rhinovirus C
agaagagcaaccttgcaagg

SEQ ID NO: 59751 - DNA, 20 bp, Human rhinovirus C
caaggtcctgaacatgaatt

SEQ ID NO: 59752 - DNA, 20 bp, Human rhinovirus C
taataagggcattcaaaaat

SEQ ID NO: 59753 - DNA, 20 bp, Human rhinovirus C
aaaaattcatgttcaggacc

SEQ ID NO: 59754 - DNA, 20 bp, Human rhinovirus C
atgttcaggaccttgcaagg

SEQ ID NO: 59755 - DNA, 20 bp, Human rhinovirus C
ccacccacatgtattcctat

SEQ ID NO: 59756 - DNA, 20 bp, Human rhinovirus C
cacccacatgtattcctatg

SEQ ID NO: 59757 - DNA, 20 bp, Human rhinovirus C
ctatgatattacctgtgttg

SEQ ID NO: 59758 - DNA, 20 bp, Human rhinovirus C
cctgtgttggccagcactgc

SEQ ID NO: 59759 - DNA, 20 bp, Human rhinovirus C
gccagcactgcaccacattg

SEQ ID NO: 59760 - DNA, 20 bp, Human rhinovirus C
acaccccaaggatccacgat

SEQ ID NO: 59761 - DNA, 20 bp, Human rhinovirus C
caccccaaggatccacgatt

SEQ ID NO: 59762 - DNA, 20 bp, Human rhinovirus C
gaagtagacctcactacagc

SEQ ID NO: 59763 - DNA, 20 bp, Human rhinovirus C
tgtcaaaatataaaggtaat

SEQ ID NO: 59764 - DNA, 20 bp, Human rhinovirus C
atgtccctatgaatgagtac

SEQ ID NO: 59765 - DNA, 20 bp, Human rhinovirus C
aacaacgctactaaagacac

SEQ ID NO: 59766 - DNA, 20 bp, Human rhinovirus C
gatctgtatggtattgatct

SEQ ID NO: 59767 - DNA, 20 bp, Human rhinovirus C
atctaccctacataactttc

SEQ ID NO: 59768 - DNA, 20 bp, Human rhinovirus C
cctaaaggatgaactccgcg

SEQ ID NO: 59769 - DNA, 20 bp, Human rhinovirus C
ctaaaggatgaactccgcgc

SEQ ID NO: 59770 - DNA, 20 bp, Human rhinovirus C
tggtcacaaatgcatgctat

SEQ ID NO: 59771 - DNA, 20 bp, Human rhinovirus C
ggtcacaaatgcatgctatg

SEQ ID NO: 59772 - DNA, 20 bp, Human rhinovirus C
gtcacaaatgcatgctatgt

SEQ ID NO: 59773 - DNA, 20 bp, Human rhinovirus C
gatggagaactcattgcttt

SEQ ID NO: 59774 - DNA, 20 bp, Human rhinovirus C
cttttgattacaccaattat

SEQ ID NO: 59775 - DNA, 20 bp, Human rhinovirus C
aaacctgactccaaatacaa

SEQ ID NO: 59776 - DNA, 20 bp, Human rhinovirus C
aacctgactccaaatacaaa

SEQ ID NO: 59777 - DNA, 20 bp, Human rhinovirus C
ctgatacatcctgtttactc

SEQ ID NO: 59778 - DNA, 20 bp, Human rhinovirus C
tgatacatcctgtttactca

SEQ ID NO: 59779 - DNA, 20 bp, Human rhinovirus C
actcaatgcaggatgtttat

SEQ ID NO: 59780 - DNA, 20 bp, Influenza A virus
gatatttcattgccatcatc

SEQ ID NO: 59781 - DNA, 20 bp, Influenza A virus
cattgccatcatccatttca

SEQ ID NO: 59782 - DNA, 20 bp, Influenza A virus
attgccatcatccatttcat

SEQ ID NO: 59783 - DNA, 20 bp, Influenza A virus
ccatcatccatttcattctg

SEQ ID NO: 59784 - DNA, 20 bp, Influenza A virus
cattctgagagcagggttct

SEQ ID NO: 59785 - DNA, 20 bp, Influenza A virus
gtggaacaggaatgggccga

SEQ ID NO: 59786 - DNA, 20 bp, Influenza A virus
tccaaaggtttacaaaacat

SEQ ID NO: 59787 - DNA, 20 bp, Influenza A virus
acaaaacatactttgagaag

SEQ ID NO: 59788 - DNA, 20 bp, Influenza A virus
tcaaagtatgttttgtaaac

SEQ ID NO: 59789 - DNA, 20 bp, Influenza A virus
tgtaaacctttggataatgg

SEQ ID NO: 59790 - DNA, 20 bp, Influenza A virus
acatcagagtcgcaattgac

SEQ ID NO: 59791 - DNA, 20 bp, Influenza A virus
acaataacaaaagagaagaa

SEQ ID NO: 59792 - DNA, 20 bp, Influenza A virus
taaaattgctcctttaatgg

SEQ ID NO: 59793 - DNA, 20 bp, Influenza A virus
ctcctttaatggtggcatac

SEQ ID NO: 59794 - DNA, 20 bp, Influenza A virus
aatggtggcatacatgttgg

SEQ ID NO: 59795 - DNA, 20 bp, Influenza A virus
caggcaacctccaaacattg

SEQ ID NO: 59796 - DNA, 20 bp, Influenza A virus
aaaataaaagtacatgaggg

SEQ ID NO: 59797 - DNA, 20 bp, Influenza A virus
acaatggttgggcggagagc

SEQ ID NO: 59798 - DNA, 20 bp, Influenza A virus
ggcggagagcaacagctatc

SEQ ID NO: 59799 - DNA, 20 bp, Influenza A virus
tagttgctttcctcaggata

SEQ ID NO: 59800 - DNA, 20 bp, Influenza A virus
aaccccatgcatcaactcct

SEQ ID NO: 59801 - DNA, 20 bp, Influenza A virus
caaaaagatgcaaaagtgct

SEQ ID NO: 59802 - DNA, 20 bp, Influenza A virus
cagaactggggaattgaacc

SEQ ID NO: 59803 - DNA, 20 bp, Influenza A virus
agaactggggaattgaacct

SEQ ID NO: 59804 - DNA, 20 bp, Influenza A virus
aattccccagttctgaaaca

SEQ ID NO: 59805 - DNA, 20 bp, Influenza A virus
tctcctgaagaggttagtga

SEQ ID NO: 59806 - DNA, 20 bp, Influenza A virus
gtgaaacacagggaacagag

SEQ ID NO: 59807 - DNA, 20 bp, Influenza A virus
acaataacatattcatcctc

SEQ ID NO: 59808 - DNA, 20 bp, Influenza A virus
aggatgaatatgttattgtc

SEQ ID NO: 59809 - DNA, 20 bp, Influenza A virus
ttgtcaacttctctgttccc

SEQ ID NO: 59810 - DNA, 20 bp, Human adenovirus
acgtcaagacgcacggccgg

SEQ ID NO: 59811 - DNA, 20 bp, Human adenovirus
ccgcagaggcgtggcctagc

SEQ ID NO: 59812 - DNA, 20 bp, Human adenovirus
aaacccggaaacggccgatt

SEQ ID NO: 59813 - DNA, 20 bp, Human adenovirus
aacccggaaacggccgattt

SEQ ID NO: 59814 - DNA, 20 bp, Human adenovirus
tcccacggccacgcccggat

SEQ ID NO: 59815 - DNA, 20 bp, Human adenovirus
cgattacggtgtttttttcg

SEQ ID NO: 59816 - DNA, 20 bp, Human adenovirus
gattacggtgtttttttcgc

SEQ ID NO: 59817 - DNA, 20 bp, Human adenovirus
cggtgtttttttcgccaatt

SEQ ID NO: 59818 - DNA, 20 bp, Human adenovirus
ttttcgccaatttccgcgtc

SEQ ID NO: 59819 - DNA, 20 bp, Human adenovirus
tttcgccaatttccgcgtcc

SEQ ID NO: 59820 - DNA, 20 bp, Human adenovirus
ggaggtaaatgcccaggaga

SEQ ID NO: 59821 - DNA, 20 bp, Human adenovirus
gaggtaaatgcccaggagaa

SEQ ID NO: 59822 - DNA, 20 bp, Human adenovirus
aatatttccagaatctatga

SEQ ID NO: 59823 - DNA, 20 bp, Human adenovirus
atatttccagaatctatgat

SEQ ID NO: 59824 - DNA, 20 bp, Human adenovirus
ccagaatctatgattcttca

SEQ ID NO: 59825 - DNA, 20 bp, Human adenovirus
ctgcgctctgtgttacatga

SEQ ID NO: 59826 - DNA, 20 bp, Human adenovirus
tcatgtaacacagagcgcag

SEQ ID NO: 59827 - DNA, 20 bp, Human adenovirus
catgtaacacagagcgcagg

SEQ ID NO: 59828 - DNA, 20 bp, Human adenovirus
atgtaacacagagcgcagga

SEQ ID NO: 59829 - DNA, 20 bp, Human adenovirus
gggtctccggtctgttcccg

SEQ ID NO: 59830 - DNA, 20 bp, Human adenovirus
acaaaattgaggatttgttg

SEQ ID NO: 59831 - DNA, 20 bp, Human adenovirus
caaaattgaggatttgttgc

SEQ ID NO: 59832 - DNA, 20 bp, Human adenovirus
aggatttgttgcaggacgtg

SEQ ID NO: 59833 - DNA, 20 bp, Human adenovirus
gttgcaggacgtgggtggga

SEQ ID NO: 59834 - DNA, 20 bp, Human adenovirus
ttgcaggacgtgggtgggaa

SEQ ID NO: 59835 - DNA, 20 bp, Human adenovirus
tggaggatagttcagacggg

SEQ ID NO: 59836 - DNA, 20 bp, Human adenovirus
agacgggtgctccgggtttt

SEQ ID NO: 59837 - DNA, 20 bp, Human adenovirus
tggagacactggtttggaac

SEQ ID NO: 59838 - DNA, 20 bp, Human adenovirus
ggagacactggtttggaact

SEQ ID NO: 59839 - DNA, 20 bp, Human adenovirus
gagacactggtttggaactc

SEQ ID NO: 59840 - DNA, 20 bp, Human adenovirus
gcagccatgcacctgtggag

SEQ ID NO: 59841 - DNA, 20 bp, Human adenovirus
cagccatgcacctgtggagg

SEQ ID NO: 59842 - DNA, 20 bp, Human adenovirus
aactactggcttttacagcc

SEQ ID NO: 59843 - DNA, 20 bp, Human adenovirus
tacagccagcagcgtcgggt

SEQ ID NO: 59844 - DNA, 20 bp, Human adenovirus
acagccagcagcgtcgggtc

SEQ ID NO: 59845 - DNA, 20 bp, Human adenovirus
agaaatatgccaagatagcc

SEQ ID NO: 59846 - DNA, 20 bp, Human adenovirus
caagtacagggtgactaaga

SEQ ID NO: 59847 - DNA, 20 bp, Human adenovirus
aacatgcctgctacatctcg

SEQ ID NO: 59848 - DNA, 20 bp, Human adenovirus
cccgagatgtagcaggcatg

SEQ ID NO: 59849 - DNA, 20 bp, Human adenovirus
aatattcacggtcttagtca

SEQ ID NO: 59850 - DNA, 20 bp, Human adenovirus
gaaaaatgctacctgggagt

SEQ ID NO: 59851 - DNA, 20 bp, Human adenovirus
aaaaatgctacctgggagtc

SEQ ID NO: 59852 - DNA, 20 bp, Human adenovirus
cctagaaacgggctgctttt

SEQ ID NO: 59853 - DNA, 20 bp, Human adenovirus
tgcctggtgaagggcacagc

SEQ ID NO: 59854 - DNA, 20 bp, Human adenovirus
gcctggtgaagggcacagcc

SEQ ID NO: 59855 - DNA, 20 bp, Human adenovirus
gagaacgatgccttctccag

SEQ ID NO: 59856 - DNA, 20 bp, Human adenovirus
tccagggtgaacctgaacgg

SEQ ID NO: 59857 - DNA, 20 bp, Human adenovirus
gacatggatgtctcggtgta

SEQ ID NO: 59858 - DNA, 20 bp, Human adenovirus
acatggatgtctcggtgtac

SEQ ID NO: 59859 - DNA, 20 bp, Human adenovirus
gtctcatcgtatctcaggat

SEQ ID NO: 59860 - DNA, 20 bp, Human adenovirus
gtcagaatgtgatgggatca

SEQ ID NO: 59861 - DNA, 20 bp, Human adenovirus
cagcaaattcctcgaccatg

SEQ ID NO: 59862 - DNA, 20 bp, Human adenovirus
ctcgaccatgacctacgcga

SEQ ID NO: 59863 - DNA, 20 bp, Human adenovirus
acagcaccgccgcagccgcg

SEQ ID NO: 59864 - DNA, 20 bp, Human adenovirus
gctggaagcactgggcgccc

SEQ ID NO: 59865 - DNA, 20 bp, Human adenovirus
agagtgcggtggattttttc

SEQ ID NO: 59866 - DNA, 20 bp, Human adenovirus
tttccaggacccggtagagg

SEQ ID NO: 59867 - DNA, 20 bp, Human adenovirus
ttccaggacccggtagaggt

SEQ ID NO: 59868 - DNA, 20 bp, Human adenovirus
tccaggacccggtagaggtg

SEQ ID NO: 59869 - DNA, 20 bp, Human adenovirus
ccaggacccggtagaggtgg

SEQ ID NO: 59870 - DNA, 20 bp, Human adenovirus
gcgatgttaccgcccagatc

SEQ ID NO: 59871 - DNA, 20 bp, Human adenovirus
ccgcccagatcccgccgggg

SEQ ID NO: 59872 - DNA, 20 bp, Human adenovirus
atgttgtgcaggaccaccag

SEQ ID NO: 59873 - DNA, 20 bp, Human adenovirus
tgcaggaccaccaggacaat

SEQ ID NO: 59874 - DNA, 20 bp, Human adenovirus
cccaagtgcacgggctacat

SEQ ID NO: 59875 - DNA, 20 bp, Human adenovirus
cttaacagctgggacttgcc

SEQ ID NO: 59876 - DNA, 20 bp, Human adenovirus
ttaacagctgggacttgccg

SEQ ID NO: 59877 - DNA, 20 bp, Human adenovirus
acagctgggacttgccgcac

SEQ ID NO: 59878 - DNA, 20 bp, Human adenovirus
ccgcacccggttgggccgta

SEQ ID NO: 59879 - DNA, 20 bp, Human adenovirus
ggccgtagatgaccccgatg

SEQ ID NO: 59880 - DNA, 20 bp, Human adenovirus
ctcgtttcgggggttgggac

SEQ ID NO: 59881 - DNA, 20 bp, Human adenovirus
cgggggttgggacgactgcg

SEQ ID NO: 59882 - DNA, 20 bp, Human adenovirus
gggggttgggacgactgcga

SEQ ID NO: 59883 - DNA, 20 bp, Human adenovirus
ggacgactgcgactgtaggg

SEQ ID NO: 59884 - DNA, 20 bp, Human adenovirus
tgccctacagtcgcagtcgt

SEQ ID NO: 59885 - DNA, 20 bp, Human adenovirus
cagggcgtacagtttgggcg

SEQ ID NO: 59886 - DNA, 20 bp, Human adenovirus
gggcgcgagaaagaccgact

SEQ ID NO: 59887 - DNA, 20 bp, Human adenovirus
ggcgcgagaaagaccgactc

SEQ ID NO: 59888 - DNA, 20 bp, Human adenovirus
gcccccgagtcggtctttct

SEQ ID NO: 59889 - DNA, 20 bp, Human adenovirus
cccccgagtcggtctttctc

SEQ ID NO: 59890 - DNA, 20 bp, Human adenovirus
gtcttggcgtggacgcgcgc

SEQ ID NO: 59891 - DNA, 20 bp, Human adenovirus
tcttggcgtggacgcgcgcc

SEQ ID NO: 59892 - DNA, 20 bp, Human adenovirus
gcgtggacgcgcgccttcgt

SEQ ID NO: 59893 - DNA, 20 bp, Human adenovirus
gtctcagagtggtccgagtt

SEQ ID NO: 59894 - DNA, 20 bp, Human adenovirus
ctttacgaggaggaccgcgg

SEQ ID NO: 59895 - DNA, 20 bp, Human adenovirus
cctctcaagagcgggcataa

SEQ ID NO: 59896 - DNA, 20 bp, Human adenovirus
tcagtttctagaaacgagga

SEQ ID NO: 59897 - DNA, 20 bp, Human adenovirus
ctagaaacgaggaggatttg

SEQ ID NO: 59898 - DNA, 20 bp, Human adenovirus
tagaaacgaggaggatttga

SEQ ID NO: 59899 - DNA, 20 bp, Human adenovirus
gatgttggcctgccctgccg

SEQ ID NO: 59900 - DNA, 20 bp, Human adenovirus
gggaaaaacagtggtgcgct

SEQ ID NO: 59901 - DNA, 20 bp, Human adenovirus
tgcagggtgaccaggtccac

SEQ ID NO: 59902 - DNA, 20 bp, Human adenovirus
tgcccgacgagcgcaccact

SEQ ID NO: 59903 - DNA, 20 bp, Human adenovirus
gccccgccttcttggcaccc

SEQ ID NO: 59904 - DNA, 20 bp, Human adenovirus
ttggcaccctcgcatgagtt

SEQ ID NO: 59905 - DNA, 20 bp, Human adenovirus
gcaccctcgcatgagttgta

SEQ ID NO: 59906 - DNA, 20 bp, Human adenovirus
tatgactacgtgcgcgccag

SEQ ID NO: 59907 - DNA, 20 bp, Human adenovirus
tcccacctacatcggcatcc

SEQ ID NO: 59908 - DNA, 20 bp, Human adenovirus
tccacggggagggcgtaagc

SEQ ID NO: 59909 - DNA, 20 bp, Human adenovirus
agcggccttgcggagcgagg

SEQ ID NO: 59910 - DNA, 20 bp, Human adenovirus
cggagcgaggtgtgcgtcag

SEQ ID NO: 59911 - DNA, 20 bp, Human adenovirus
aagtaccagtttttgaaagt

SEQ ID NO: 59912 - DNA, 20 bp, Human adenovirus
agtaccagtttttgaaagtc

SEQ ID NO: 59913 - DNA, 20 bp, Human adenovirus
atgttgtgcccgacaatgta

SEQ ID NO: 59914 - DNA, 20 bp, Human adenovirus
tgcccgacaatgtatagttc

SEQ ID NO: 59915 - DNA, 20 bp, Human adenovirus
catgaatcgcgggcggcctt

SEQ ID NO: 59916 - DNA, 20 bp, Human adenovirus
gatgtgcggcagctttttaa

SEQ ID NO: 59917 - DNA, 20 bp, Human adenovirus
atgtgcggcagctttttaag

SEQ ID NO: 59918 - DNA, 20 bp, Human adenovirus
gggtccccggagaatttcat

SEQ ID NO: 59919 - DNA, 20 bp, Human adenovirus
catgaccagcatgaagggga

SEQ ID NO: 59920 - DNA, 20 bp, Human adenovirus
atgaccagcatgaaggggac

SEQ ID NO: 59921 - DNA, 20 bp, Human adenovirus
ccgaaggaccccatccaggt

SEQ ID NO: 59922 - DNA, 20 bp, Human adenovirus
ggcaagcagcttgtcccctt

SEQ ID NO: 59923 - DNA, 20 bp, Human adenovirus
aggaggaacttcaggagtgg

SEQ ID NO: 59924 - DNA, 20 bp, Human adenovirus
aggagtggcggccctggctg

SEQ ID NO: 59925 - DNA, 20 bp, Human adenovirus
tcatgttcgcctgcgtagga

SEQ ID NO: 59926 - DNA, 20 bp, Human adenovirus
catgttcgcctgcgtaggac

SEQ ID NO: 59927 - DNA, 20 bp, Human adenovirus
atgttcgcctgcgtaggact

SEQ ID NO: 59928 - DNA, 20 bp, Human adenovirus
gaacctgaaagacagttcaa

SEQ ID NO: 59929 - DNA, 20 bp, Human adenovirus
aacctgaaagacagttcaac

SEQ ID NO: 59930 - DNA, 20 bp, Human adenovirus
aacagaatcaatctcggcgt

SEQ ID NO: 59931 - DNA, 20 bp, Human adenovirus
acggcggcctgccgcaggat

SEQ ID NO: 59932 - DNA, 20 bp, Human adenovirus
attctgttgaactgtctttc

SEQ ID NO: 59933 - DNA, 20 bp, Human adenovirus
agctccacgtgccgcgtaaa

SEQ ID NO: 59934 - DNA, 20 bp, Human adenovirus
cgcaggcgctgaaaaaggta

SEQ ID NO: 59935 - DNA, 20 bp, Human adenovirus
agggtggtggcgatgtgctc

SEQ ID NO: 59936 - DNA, 20 bp, Human adenovirus
tttgtcaccgagcacatcgc

SEQ ID NO: 59937 - DNA, 20 bp, Human adenovirus
gtcaccgagcacatcgccac

SEQ ID NO: 59938 - DNA, 20 bp, Human adenovirus
ttcctcttccatgacgacct

SEQ ID NO: 59939 - DNA, 20 bp, Human adenovirus
ctcttccatgacgacctctt

SEQ ID NO: 59940 - DNA, 20 bp, Human adenovirus
catgacgacctcttcttcta

SEQ ID NO: 59941 - DNA, 20 bp, Human adenovirus
ttctatttcctctgggggcg

SEQ ID NO: 59942 - DNA, 20 bp, Human adenovirus
tatttcctctgggggcggtg

SEQ ID NO: 59943 - DNA, 20 bp, Human adenovirus
tcaattgcggcgtaggggac

SEQ ID NO: 59944 - DNA, 20 bp, Human adenovirus
cggcgtaggggacgtaagcg

SEQ ID NO: 59945 - DNA, 20 bp, Human adenovirus
ggaggaaagcgtctagccaa

SEQ ID NO: 59946 - DNA, 20 bp, Human adenovirus
gaggaaagcgtctagccaat

SEQ ID NO: 59947 - DNA, 20 bp, Human adenovirus
aacacgtagcagccctgtgg

SEQ ID NO: 59948 - DNA, 20 bp, Human adenovirus
catgcgggtaaccccaacgc

SEQ ID NO: 59949 - DNA, 20 bp, Human adenovirus
cacgcgggtgagggtgtctt

SEQ ID NO: 59950 - DNA, 20 bp, Human adenovirus
caagacaccctcacccgcgt

SEQ ID NO: 59951 - DNA, 20 bp, Human adenovirus
ccgagcgcgtcgtcgccgac

SEQ ID NO: 59952 - DNA, 20 bp, Human adenovirus
gggttacccgcatggaagac

SEQ ID NO: 59953 - DNA, 20 bp, Human adenovirus
ccgcgcgcctccaccaccgc

SEQ ID NO: 59954 - DNA, 20 bp, Human adenovirus
cctggatgtcccgctacctc

SEQ ID NO: 59955 - DNA, 20 bp, Human adenovirus
ggccgcgcgtgtaccccggt

SEQ ID NO: 59956 - DNA, 20 bp, Human adenovirus
gagtcccctcgaatcaggct

SEQ ID NO: 59957 - DNA, 20 bp, Human adenovirus
gcactcccgtctcgacccaa

SEQ ID NO: 59958 - DNA, 20 bp, Human adenovirus
ggtcgagacgggagtgccaa

SEQ ID NO: 59959 - DNA, 20 bp, Human adenovirus
gtcgcggctttagcctgatt

SEQ ID NO: 59960 - DNA, 20 bp, Human adenovirus
gcagacggccgcggcgagcg

SEQ ID NO: 59961 - DNA, 20 bp, Human adenovirus
tttcttttgccagatgcatc

SEQ ID NO: 59962 - DNA, 20 bp, Human adenovirus
ttcttttgccagatgcatcc

SEQ ID NO: 59963 - DNA, 20 bp, Human adenovirus
tcttttgccagatgcatccc

SEQ ID NO: 59964 - DNA, 20 bp, Human adenovirus
cttttgccagatgcatcccg

SEQ ID NO: 59965 - DNA, 20 bp, Human adenovirus
caaaagagtttcaacaacca

SEQ ID NO: 59966 - DNA, 20 bp, Human adenovirus
caacaaccacgtgcgcaccc

SEQ ID NO: 59967 - DNA, 20 bp, Human adenovirus
aacaaccacgtgcgcaccct

SEQ ID NO: 59968 - DNA, 20 bp, Human adenovirus
cgcgcgaggaggtggccctg

SEQ ID NO: 59969 - DNA, 20 bp, Human adenovirus
ttgaaactcttttggaagtt

SEQ ID NO: 59970 - DNA, 20 bp, Human adenovirus
tacgcgcgcaagatttacaa

SEQ ID NO: 59971 - DNA, 20 bp, Human adenovirus
acgcgcgcaagatttacaag

SEQ ID NO: 59972 - DNA, 20 bp, Human adenovirus
cgcgcgcaagatttacaaga

SEQ ID NO: 59973 - DNA, 20 bp, Human adenovirus
acaagacgccgtacgtgccc

SEQ ID NO: 59974 - DNA, 20 bp, Human adenovirus
caagacgccgtacgtgccca

SEQ ID NO: 59975 - DNA, 20 bp, Human adenovirus
ttagatgtcccagcagcaag

SEQ ID NO: 59976 - DNA, 20 bp, Human adenovirus
tagatgtcccagcagcaagc

SEQ ID NO: 59977 - DNA, 20 bp, Human adenovirus
agatgtcccagcagcaagcc

SEQ ID NO: 59978 - DNA, 20 bp, Human adenovirus
gatgtcccagcagcaagccc

SEQ ID NO: 59979 - DNA, 20 bp, Human adenovirus
gcagcgccgcccttatggcg

SEQ ID NO: 59980 - DNA, 20 bp, Human adenovirus
gactgcacgttcgtgctgtt

SEQ ID NO: 59981 - DNA, 20 bp, Human adenovirus
gtgctgttgtagcggcccac

SEQ ID NO: 59982 - DNA, 20 bp, Human adenovirus
tagcggcccacgcgctccag

SEQ ID NO: 59983 - DNA, 20 bp, Human adenovirus
tacaccagcccggcctcgtc

SEQ ID NO: 59984 - DNA, 20 bp, Human adenovirus
caagaacctacgcgggctgt

SEQ ID NO: 59985 - DNA, 20 bp, Human adenovirus
aagaacctacgcgggctgtg

SEQ ID NO: 59986 - DNA, 20 bp, Human adenovirus
ttgacgcccaactcgcggct

SEQ ID NO: 59987 - DNA, 20 bp, Human adenovirus
acgcccaactcgcggctgct

SEQ ID NO: 59988 - DNA, 20 bp, Human adenovirus
ggcgtcaacaagctgctcac

SEQ ID NO: 59989 - DNA, 20 bp, Human adenovirus
ctgctgaccaatagacagca

SEQ ID NO: 59990 - DNA, 20 bp, Human adenovirus
cgccgcagtacgcactgtcg

SEQ ID NO: 59991 - DNA, 20 bp, Human adenovirus
tgagatatgtgcagcagagc

SEQ ID NO: 59992 - DNA, 20 bp, Human adenovirus
cttcctcggccgacagtgcg

SEQ ID NO: 59993 - DNA, 20 bp, Human adenovirus
ttcctcggccgacagtgcgt

SEQ ID NO: 59994 - DNA, 20 bp, Human adenovirus
accaatgccatcttgaaccc

SEQ ID NO: 59995 - DNA, 20 bp, Human adenovirus
ccaatgccatcttgaacccg

SEQ ID NO: 59996 - DNA, 20 bp, Human adenovirus
aacccgcattggctcccgcc

SEQ ID NO: 59997 - DNA, 20 bp, Human adenovirus
gctcccgccgccagggttct

SEQ ID NO: 59998 - DNA, 20 bp, Human adenovirus
tacacgggcgagtacgacat

SEQ ID NO: 59999 - DNA, 20 bp, Human adenovirus
cagcggtttagtttgtccac

SEQ ID NO: 60000 - DNA, 20 bp, Human adenovirus
agtttgtccaccagactttc

SEQ ID NO: 60001 - DNA, 20 bp, Human adenovirus
gtttgtccaccagactttct

SEQ ID NO: 60002 - DNA, 20 bp, Human adenovirus
gtccaccagactttctatcc

SEQ ID NO: 60003 - DNA, 20 bp, Human adenovirus
tccaccagactttctatccc

SEQ ID NO: 60004 - DNA, 20 bp, Human adenovirus
cgtttgtgcctccgcggtat

SEQ ID NO: 60005 - DNA, 20 bp, Human adenovirus
gtgcctccgcggtatatggc

SEQ ID NO: 60006 - DNA, 20 bp, Human adenovirus
tgcctccgcggtatatggct

SEQ ID NO: 60007 - DNA, 20 bp, Human adenovirus
cctgcgccatcacgctctcg

SEQ ID NO: 60008 - DNA, 20 bp, Human adenovirus
gagtcaagtttgacagcaga

SEQ ID NO: 60009 - DNA, 20 bp, Human adenovirus
gacagcagaaatttcaagct

SEQ ID NO: 60010 - DNA, 20 bp, Human adenovirus
acagcagaaatttcaagctg

SEQ ID NO: 60011 - DNA, 20 bp, Human adenovirus
caagctgggctgggacccgg

SEQ ID NO: 60012 - DNA, 20 bp, Human adenovirus
aagctgggctgggacccggt

SEQ ID NO: 60013 - DNA, 20 bp, Human adenovirus
atgctcctgcaagaggagat

SEQ ID NO: 60014 - DNA, 20 bp, Human adenovirus
tctacagctcttgggacact

SEQ ID NO: 60015 - DNA, 20 bp, Human adenovirus
ctacagctcttgggacactg

SEQ ID NO: 60016 - DNA, 20 bp, Human adenovirus
tacagctcttgggacactgc

SEQ ID NO: 60017 - DNA, 20 bp, Human adenovirus
ggacactgctatctcctctt

SEQ ID NO: 60018 - DNA, 20 bp, Human adenovirus
cgctccacccagcaagtcag

SEQ ID NO: 60019 - DNA, 20 bp, Human adenovirus
gctccacccagcaagtcagc

SEQ ID NO: 60020 - DNA, 20 bp, Human adenovirus
gcgccgagctcatgcccttc

SEQ ID NO: 60021 - DNA, 20 bp, Human adenovirus
tggcgcggaagggcatgagc

SEQ ID NO: 60022 - DNA, 20 bp, Human adenovirus
ggcgcggaagggcatgagct

SEQ ID NO: 60023 - DNA, 20 bp, Human adenovirus
tagaaaatgtccattctcat

SEQ ID NO: 60024 - DNA, 20 bp, Human adenovirus
tctagaaggtgcgactggag

SEQ ID NO: 60025 - DNA, 20 bp, Human adenovirus
ctagaaggtgcgactggaga

SEQ ID NO: 60026 - DNA, 20 bp, Human adenovirus
tagaaggtgcgactggagag

SEQ ID NO: 60027 - DNA, 20 bp, Human adenovirus
tagacgtagggacaggtgcg

SEQ ID NO: 60028 - DNA, 20 bp, Human adenovirus
actccgtagtcgctgacgcg

SEQ ID NO: 60029 - DNA, 20 bp, Human adenovirus
cgcgcgtcagcgactacgga

SEQ ID NO: 60030 - DNA, 20 bp, Human adenovirus
ccgccgccgcggccatctct

SEQ ID NO: 60031 - DNA, 20 bp, Human adenovirus
ccgcgcctgggtctggtcat

SEQ ID NO: 60032 - DNA, 20 bp, Human adenovirus
cgcgcctgggtctggtcatg

SEQ ID NO: 60033 - DNA, 20 bp, Human adenovirus
gaaggggcgcagggtgcagc

SEQ ID NO: 60034 - DNA, 20 bp, Human adenovirus
cggcccggcacggcggtggt

SEQ ID NO: 60035 - DNA, 20 bp, Human adenovirus
acgcccggcgagcggtcctc

SEQ ID NO: 60036 - DNA, 20 bp, Human adenovirus
cgcccggcgagcggtcctcg

SEQ ID NO: 60037 - DNA, 20 bp, Human adenovirus
caatttacgcgccgccgcgg

SEQ ID NO: 60038 - DNA, 20 bp, Human adenovirus
aggtgcgccccattaagcag

SEQ ID NO: 60039 - DNA, 20 bp, Human adenovirus
agcaggtggcgccgggcctg

SEQ ID NO: 60040 - DNA, 20 bp, Human adenovirus
atggggcgcaccttaacctc

SEQ ID NO: 60041 - DNA, 20 bp, Human adenovirus
acctcgggctccacatccat

SEQ ID NO: 60042 - DNA, 20 bp, Human adenovirus
tcacggtgtccagcacgtcc

SEQ ID NO: 60043 - DNA, 20 bp, Human adenovirus
acatccacggccaccgagcc

SEQ ID NO: 60044 - DNA, 20 bp, Human adenovirus
catccacggccaccgagcct

SEQ ID NO: 60045 - DNA, 20 bp, Human adenovirus
caggaggcgaagatggggcc

SEQ ID NO: 60046 - DNA, 20 bp, Human adenovirus
ggcatcagccggttggcagg

SEQ ID NO: 60047 - DNA, 20 bp, Human adenovirus
gcagggccccatcttcgcct

SEQ ID NO: 60048 - DNA, 20 bp, Human adenovirus
ccgcctgcgcattcccgtcc

SEQ ID NO: 60049 - DNA, 20 bp, Human adenovirus
ccgtcccgaattaccgagga

SEQ ID NO: 60050 - DNA, 20 bp, Human adenovirus
ccgaggaagatcccgccgca

SEQ ID NO: 60051 - DNA, 20 bp, Human adenovirus
aggccgctgcctgccatgcc

SEQ ID NO: 60052 - DNA, 20 bp, Human adenovirus
ggccgctgcctgccatgcct

SEQ ID NO: 60053 - DNA, 20 bp, Human adenovirus
atgggcacctggaacgagat

SEQ ID NO: 60054 - DNA, 20 bp, Human adenovirus
aattggagcagtgtctggag

SEQ ID NO: 60055 - DNA, 20 bp, Human adenovirus
gagcagtgtctggagcgggc

SEQ ID NO: 60056 - DNA, 20 bp, Human adenovirus
ttaagcccgctccagacact

SEQ ID NO: 60057 - DNA, 20 bp, Human adenovirus
taagcccgctccagacactg

SEQ ID NO: 60058 - DNA, 20 bp, Human adenovirus
tcgcccctgggcggaggagt

SEQ ID NO: 60059 - DNA, 20 bp, Human adenovirus
catcttccatctccaccacc

SEQ ID NO: 60060 - DNA, 20 bp, Human adenovirus
catctccaccaccgtgggcg

SEQ ID NO: 60061 - DNA, 20 bp, Human adenovirus
agacttttcactcccaggcc

SEQ ID NO: 60062 - DNA, 20 bp, Human adenovirus
tcactcccaggcccacgata

SEQ ID NO: 60063 - DNA, 20 bp, Human adenovirus
cactcccaggcccacgatac

SEQ ID NO: 60064 - DNA, 20 bp, Human adenovirus
actcccaggcccacgatact

SEQ ID NO: 60065 - DNA, 20 bp, Human adenovirus
tgggcctggcggcgggcggg

SEQ ID NO: 60066 - DNA, 20 bp, Human adenovirus
gcccgcgccaccgacacgta

SEQ ID NO: 60067 - DNA, 20 bp, Human adenovirus
cccgcgccaccgacacgtac

SEQ ID NO: 60068 - DNA, 20 bp, Human adenovirus
agcctgggcaacaagtttag

SEQ ID NO: 60069 - DNA, 20 bp, Human adenovirus
agaaaccccacggtggctcc

SEQ ID NO: 60070 - DNA, 20 bp, Human adenovirus
gaaaccccacggtggctccc

SEQ ID NO: 60071 - DNA, 20 bp, Human adenovirus
agggtctgcaaattggtgtt

SEQ ID NO: 60072 - DNA, 20 bp, Human adenovirus
gtgttgacaaaactgaaaac

SEQ ID NO: 60073 - DNA, 20 bp, Human adenovirus
acaaaactgaaaacaaaaat

SEQ ID NO: 60074 - DNA, 20 bp, Human adenovirus
ttgttttcagttttgtcaac

SEQ ID NO: 60075 - DNA, 20 bp, Human adenovirus
tgttttcagttttgtcaaca

SEQ ID NO: 60076 - DNA, 20 bp, Human adenovirus
ccagcttttgctagattctc

SEQ ID NO: 60077 - DNA, 20 bp, Human adenovirus
tgctagattctctgggtgac

SEQ ID NO: 60078 - DNA, 20 bp, Human adenovirus
gctagattctctgggtgaca

SEQ ID NO: 60079 - DNA, 20 bp, Human adenovirus
ctagattctctgggtgacag

SEQ ID NO: 60080 - DNA, 20 bp, Human adenovirus
tctgggtgacagaaccagat

SEQ ID NO: 60081 - DNA, 20 bp, Human adenovirus
aagtacacgccggccaacgt

SEQ ID NO: 60082 - DNA, 20 bp, Human adenovirus
agtacacgccggccaacgtc

SEQ ID NO: 60083 - DNA, 20 bp, Human adenovirus
atgtactcgtaggtgttggt

SEQ ID NO: 60084 - DNA, 20 bp, Human adenovirus
gtgttggtgggcagtgtgac

SEQ ID NO: 60085 - DNA, 20 bp, Human adenovirus
gtgggcagtgtgacgttggc

SEQ ID NO: 60086 - DNA, 20 bp, Human adenovirus
cgcaaggacgtcaacatgat

SEQ ID NO: 60087 - DNA, 20 bp, Human adenovirus
cctgggcaacgacctgcgcg

SEQ ID NO: 60088 - DNA, 20 bp, Human adenovirus
gacagtgtgaacctctacgc

SEQ ID NO: 60089 - DNA, 20 bp, Human adenovirus
acagtgtgaacctctacgcc

SEQ ID NO: 60090 - DNA, 20 bp, Human adenovirus
acactgtcaaagcggacgga

SEQ ID NO: 60091 - DNA, 20 bp, Human adenovirus
cgccgaacgagttcgagatt

SEQ ID NO: 60092 - DNA, 20 bp, Human adenovirus
gagattaagcgcagcgtcga

SEQ ID NO: 60093 - DNA, 20 bp, Human adenovirus
agcgcagcgtcgacggggag

SEQ ID NO: 60094 - DNA, 20 bp, Human adenovirus
cttatccagatgctttccca

SEQ ID NO: 60095 - DNA, 20 bp, Human adenovirus
tccagatgctttcccactac

SEQ ID NO: 60096 - DNA, 20 bp, Human adenovirus
accggctacctcgcacctac

SEQ ID NO: 60097 - DNA, 20 bp, Human adenovirus
ccctacccgcttattggaga

SEQ ID NO: 60098 - DNA, 20 bp, Human adenovirus
gcggggtagggctgcccctg

SEQ ID NO: 60099 - DNA, 20 bp, Human adenovirus
tccgccggcaacgccaccac

SEQ ID NO: 60100 - DNA, 20 bp, Human adenovirus
ttcgctggagccgctcatgc

SEQ ID NO: 60101 - DNA, 20 bp, Human adenovirus
gctggagccgctcatgctta

SEQ ID NO: 60102 - DNA, 20 bp, Human adenovirus
ggtggtggcgttgccggcgg

SEQ ID NO: 60103 - DNA, 20 bp, Human adenovirus
ccggcggagaagggcgtgcg

SEQ ID NO: 60104 - DNA, 20 bp, Human adenovirus
gacccctttgggttttcgga

SEQ ID NO: 60105 - DNA, 20 bp, Human adenovirus
acccctttgggttttcggac

SEQ ID NO: 60106 - DNA, 20 bp, Human adenovirus
gggttttcggaccgccggct

SEQ ID NO: 60107 - DNA, 20 bp, Human adenovirus
ggttttcggaccgccggctt

SEQ ID NO: 60108 - DNA, 20 bp, Human adenovirus
tcggaccgccggcttaagca

SEQ ID NO: 60109 - DNA, 20 bp, Human adenovirus
ctaacgggggtgcccaatgg

SEQ ID NO: 60110 - DNA, 20 bp, Human adenovirus
cgccggagggtgggcagcac

SEQ ID NO: 60111 - DNA, 20 bp, Human adenovirus
tagcatgccattgggcaccc

SEQ ID NO: 60112 - DNA, 20 bp, Human adenovirus
ggcacccccgttagcaagtt

SEQ ID NO: 60113 - DNA, 20 bp, Human adenovirus
aactcggggatcaccagttt

SEQ ID NO: 60114 - DNA, 20 bp, Human adenovirus
gggaacagcaatctcgggga

SEQ ID NO: 60115 - DNA, 20 bp, Human adenovirus
ggaacagcaatctcggggaa

SEQ ID NO: 60116 - DNA, 20 bp, Human adenovirus
taaaatttcagccccggaca

SEQ ID NO: 60117 - DNA, 20 bp, Human adenovirus
aaaatttcagccccggacat

SEQ ID NO: 60118 - DNA, 20 bp, Human adenovirus
cactcgcagtgcacgggcat

SEQ ID NO: 60119 - DNA, 20 bp, Human adenovirus
gcatcatccctgcgccgcgc

SEQ ID NO: 60120 - DNA, 20 bp, Human adenovirus
gggtacagggccttaataaa

SEQ ID NO: 60121 - DNA, 20 bp, Human adenovirus
ataaaggccataatctgctt

SEQ ID NO: 60122 - DNA, 20 bp, Human adenovirus
aaagcttgctgggccttggc

SEQ ID NO: 60123 - DNA, 20 bp, Human adenovirus
tggatcattaccgtcccgtg

SEQ ID NO: 60124 - DNA, 20 bp, Human adenovirus
ccgtcccgtgcagacacttg

SEQ ID NO: 60125 - DNA, 20 bp, Human adenovirus
agctggccttccacctcggc

SEQ ID NO: 60126 - DNA, 20 bp, Human adenovirus
cacctcggcacagccgtggt

SEQ ID NO: 60127 - DNA, 20 bp, Human adenovirus
taagcatcgcgcaggccgct

SEQ ID NO: 60128 - DNA, 20 bp, Human adenovirus
catcagcacgttcatggtat

SEQ ID NO: 60129 - DNA, 20 bp, Human adenovirus
atggtatccatgcccttctc

SEQ ID NO: 60130 - DNA, 20 bp, Human adenovirus
tcccaggacgaaaccaaagg

SEQ ID NO: 60131 - DNA, 20 bp, Human adenovirus
ggtttcgtcctgggagaagg

SEQ ID NO: 60132 - DNA, 20 bp, Human adenovirus
ttttttggagggctgtccag

SEQ ID NO: 60133 - DNA, 20 bp, Human adenovirus
tttggagggctgtccagtgg

SEQ ID NO: 60134 - DNA, 20 bp, Human adenovirus
ttggagggctgtccagtgga

SEQ ID NO: 60135 - DNA, 20 bp, Human adenovirus
tggagggctgtccagtggaa

SEQ ID NO: 60136 - DNA, 20 bp, Human adenovirus
ggagggctgtccagtggaac

SEQ ID NO: 60137 - DNA, 20 bp, Human adenovirus
gaagagccggctcgtctaga

SEQ ID NO: 60138 - DNA, 20 bp, Human adenovirus
gtttccttctgttcatcctg

SEQ ID NO: 60139 - DNA, 20 bp, Human adenovirus
ccttctgttcatcctgtggg

SEQ ID NO: 60140 - DNA, 20 bp, Human adenovirus
cttctgttcatcctgtgggg

SEQ ID NO: 60141 - DNA, 20 bp, Human adenovirus
tgttcatcctgtgggggttc

SEQ ID NO: 60142 - DNA, 20 bp, Human adenovirus
gaaggcgataacgccaggct

SEQ ID NO: 60143 - DNA, 20 bp, Human adenovirus
agcgcagcgtcgagctcacc

SEQ ID NO: 60144 - DNA, 20 bp, Human adenovirus
tgcctaccccgccgttaacc

SEQ ID NO: 60145 - DNA, 20 bp, Human adenovirus
gcctaccccgccgttaacct

SEQ ID NO: 60146 - DNA, 20 bp, Human adenovirus
cctaccccgccgttaacctc

SEQ ID NO: 60147 - DNA, 20 bp, Human adenovirus
tttagcgaccccgagaccct

SEQ ID NO: 60148 - DNA, 20 bp, Human adenovirus
ttagcgaccccgagaccctg

SEQ ID NO: 60149 - DNA, 20 bp, Human adenovirus
tagcgaccccgagaccctgc

SEQ ID NO: 60150 - DNA, 20 bp, Human adenovirus
agcgaccccgagaccctgcg

SEQ ID NO: 60151 - DNA, 20 bp, Human adenovirus
gcgaccccgagaccctgcgc

SEQ ID NO: 60152 - DNA, 20 bp, Human adenovirus
ttgctaaaaaccttaaaacg

SEQ ID NO: 60153 - DNA, 20 bp, Human adenovirus
ctaaaaaccttaaaacgttg

SEQ ID NO: 60154 - DNA, 20 bp, Human adenovirus
aaacgttgtggacgggcttt

SEQ ID NO: 60155 - DNA, 20 bp, Human adenovirus
tggacgggctttgacgagcg

SEQ ID NO: 60156 - DNA, 20 bp, Human adenovirus
gacgagcgcaccgtcgcctt

SEQ ID NO: 60157 - DNA, 20 bp, Human adenovirus
cctaccactcggacgtgatc

SEQ ID NO: 60158 - DNA, 20 bp, Human adenovirus
agtgccactgccgctgcaac

SEQ ID NO: 60159 - DNA, 20 bp, Human adenovirus
cagcggcagtggcactcaag

SEQ ID NO: 60160 - DNA, 20 bp, Human adenovirus
cgtcctcgatcacgtccgag

SEQ ID NO: 60161 - DNA, 20 bp, Human adenovirus
cggcctgcgtcatcacccag

SEQ ID NO: 60162 - DNA, 20 bp, Human adenovirus
cacgccatccaaaaatcccg

SEQ ID NO: 60163 - DNA, 20 bp, Human adenovirus
ttcagaagaaactcttggcg

SEQ ID NO: 60164 - DNA, 20 bp, Human adenovirus
tcagaagaaactcttggcgg

SEQ ID NO: 60165 - DNA, 20 bp, Human adenovirus
cagaagaaactcttggcggg

SEQ ID NO: 60166 - DNA, 20 bp, Human adenovirus
ccgtcaccctttactcgatc

SEQ ID NO: 60167 - DNA, 20 bp, Human adenovirus
actcgatcccatctacgagg

SEQ ID NO: 60168 - DNA, 20 bp, Human adenovirus
ctcgatcccatctacgagga

SEQ ID NO: 60169 - DNA, 20 bp, Human adenovirus
accggaggggctgccggcgc

SEQ ID NO: 60170 - DNA, 20 bp, Human adenovirus
cccactctttatgccatttt

SEQ ID NO: 60171 - DNA, 20 bp, Human adenovirus
atgccatttttcagcagagt

SEQ ID NO: 60172 - DNA, 20 bp, Human adenovirus
tgccatttttcagcagagtc

SEQ ID NO: 60173 - DNA, 20 bp, Human adenovirus
ttcagcagagtcgaggtcag

SEQ ID NO: 60174 - DNA, 20 bp, Human adenovirus
tcagcagagtcgaggtcagc

SEQ ID NO: 60175 - DNA, 20 bp, Human adenovirus
ccggtgtccgcccagacccg

SEQ ID NO: 60176 - DNA, 20 bp, Human adenovirus
ggtataaaaacactgctgat

SEQ ID NO: 60177 - DNA, 20 bp, Human adenovirus
ttatacctaagtcgggtctg

SEQ ID NO: 60178 - DNA, 20 bp, Human adenovirus
tatacctaagtcgggtctgg

SEQ ID NO: 60179 - DNA, 20 bp, Human adenovirus
atacctaagtcgggtctggg

SEQ ID NO: 60180 - DNA, 20 bp, Human adenovirus
tgccctcggtttactttaac

SEQ ID NO: 60181 - DNA, 20 bp, Human adenovirus
actttaaccccttttcaggc

SEQ ID NO: 60182 - DNA, 20 bp, Human adenovirus
ctttaaccccttttcaggct

SEQ ID NO: 60183 - DNA, 20 bp, Human adenovirus
aaccccttttcaggctcccc

SEQ ID NO: 60184 - DNA, 20 bp, Human adenovirus
accccttttcaggctcccca

SEQ ID NO: 60185 - DNA, 20 bp, Human adenovirus
ttgctgtactctttgtggtg

SEQ ID NO: 60186 - DNA, 20 bp, Human adenovirus
tgctgtactctttgtggtga

SEQ ID NO: 60187 - DNA, 20 bp, Human adenovirus
gctgtactctttgtggtgag

SEQ ID NO: 60188 - DNA, 20 bp, Human adenovirus
ctgtactctttgtggtgagt

SEQ ID NO: 60189 - DNA, 20 bp, Human adenovirus
gtggtgagtttaataaaagc

SEQ ID NO: 60190 - DNA, 20 bp, Human adenovirus
cggggaggaaccatgaaggg

SEQ ID NO: 60191 - DNA, 20 bp, Human adenovirus
tgctaattatcctttccctg

SEQ ID NO: 60192 - DNA, 20 bp, Human adenovirus
gctaattatcctttccctgg

SEQ ID NO: 60193 - DNA, 20 bp, Human adenovirus
ctaattatcctttccctggt

SEQ ID NO: 60194 - DNA, 20 bp, Human adenovirus
tcctttccctggtggggggt

SEQ ID NO: 60195 - DNA, 20 bp, Human adenovirus
ggttttctttggcttttgta

SEQ ID NO: 60196 - DNA, 20 bp, Human adenovirus
tctttggcttttgtaattat

SEQ ID NO: 60197 - DNA, 20 bp, Human adenovirus
ctttggcttttgtaattatg

SEQ ID NO: 60198 - DNA, 20 bp, Human adenovirus
tttggcttttgtaattatgg

SEQ ID NO: 60199 - DNA, 20 bp, Human adenovirus
ggcttttgtaattatggcct

SEQ ID NO: 60200 - DNA, 20 bp, Human adenovirus
tgtgatggaaatacaattaa

SEQ ID NO: 60201 - DNA, 20 bp, Human adenovirus
gtgatggaaatacaattaaa

SEQ ID NO: 60202 - DNA, 20 bp, Human adenovirus
tgatggaaatacaattaaaa

SEQ ID NO: 60203 - DNA, 20 bp, Human adenovirus
aaaacccacaaatcaagcat

SEQ ID NO: 60204 - DNA, 20 bp, Human adenovirus
acttaatgctgacaagtctc

SEQ ID NO: 60205 - DNA, 20 bp, Human adenovirus
caaaacggggctaaacaaag

SEQ ID NO: 60206 - DNA, 20 bp, Human adenovirus
aaaacggggctaaacaaagt

SEQ ID NO: 60207 - DNA, 20 bp, Human adenovirus
aacaaagtaatattggacaa

SEQ ID NO: 60208 - DNA, 20 bp, Human adenovirus
gacaaggtaatactgctcaa

SEQ ID NO: 60209 - DNA, 20 bp, Human adenovirus
agccaacacaattgtatgtt

SEQ ID NO: 60210 - DNA, 20 bp, Human adenovirus
aaattaagccacataccaaa

SEQ ID NO: 60211 - DNA, 20 bp, Human adenovirus
agccacataccaaagaacct

SEQ ID NO: 60212 - DNA, 20 bp, Human adenovirus
caattacaagttgcagaaac

SEQ ID NO: 60213 - DNA, 20 bp, Human adenovirus
aattacaagttgcagaaact

SEQ ID NO: 60214 - DNA, 20 bp, Human adenovirus
caagttgcagaaactgatca

SEQ ID NO: 60215 - DNA, 20 bp, Human adenovirus
cttttctggttatctgtggg

SEQ ID NO: 60216 - DNA, 20 bp, Human adenovirus
tctggttatctgtgggatct

SEQ ID NO: 60217 - DNA, 20 bp, Human adenovirus
ctggttatctgtgggatctt

SEQ ID NO: 60218 - DNA, 20 bp, Human adenovirus
tggttatctgtgggatcttt

SEQ ID NO: 60219 - DNA, 20 bp, Human adenovirus
tctgtgggatctttattctc

SEQ ID NO: 60220 - DNA, 20 bp, Human adenovirus
tctttgccctgctcacctgc

SEQ ID NO: 60221 - DNA, 20 bp, Human adenovirus
gccctgctcacctgcacctg

SEQ ID NO: 60222 - DNA, 20 bp, Human adenovirus
ccctgctcacctgcacctgc

SEQ ID NO: 60223 - DNA, 20 bp, Human adenovirus
tctgcctggtcattaccttc

SEQ ID NO: 60224 - DNA, 20 bp, Human adenovirus
ccttcctgcagcttatcgac

SEQ ID NO: 60225 - DNA, 20 bp, Human adenovirus
ctttgctattatgatctacc

SEQ ID NO: 60226 - DNA, 20 bp, Human adenovirus
tttgctattatgatctaccc

SEQ ID NO: 60227 - DNA, 20 bp, Human adenovirus
gctattatgatctacccctg

SEQ ID NO: 60228 - DNA, 20 bp, Human adenovirus
ctattatgatctacccctgt

SEQ ID NO: 60229 - DNA, 20 bp, Human adenovirus
tgatctacccctgttttgat

SEQ ID NO: 60230 - DNA, 20 bp, Human adenovirus
acctgcatggtgggcgtcaa

SEQ ID NO: 60231 - DNA, 20 bp, Human adenovirus
ctcctgcgaaagccccgagt

SEQ ID NO: 60232 - DNA, 20 bp, Human adenovirus
cgcaggagcaatggatacag

SEQ ID NO: 60233 - DNA, 20 bp, Human adenovirus
gcaggagcaatggatacagc

SEQ ID NO: 60234 - DNA, 20 bp, Human adenovirus
cgcccgtctgctgggtgatg

SEQ ID NO: 60235 - DNA, 20 bp, Human adenovirus
gtctcctccaatggattcca

SEQ ID NO: 60236 - DNA, 20 bp, Human adenovirus
tctcctccaatggattccaa

SEQ ID NO: 60237 - DNA, 20 bp, Human adenovirus
caaaacttcccccctggggt

SEQ ID NO: 60238 - DNA, 20 bp, Human adenovirus
ccccctggggttctgtcact

SEQ ID NO: 60239 - DNA, 20 bp, Human adenovirus
tgtcactcaaactggctaac

SEQ ID NO: 60240 - DNA, 20 bp, Human adenovirus
cagaaggcggtggcttatca

SEQ ID NO: 60241 - DNA, 20 bp, Human adenovirus
tcatttaatgataatggaga

SEQ ID NO: 60242 - DNA, 20 bp, Human adenovirus
aatgataatggagacttggt

SEQ ID NO: 60243 - DNA, 20 bp, Human adenovirus
atgataatggagacttggta

SEQ ID NO: 60244 - DNA, 20 bp, Human adenovirus
gtagcatttaataaaaaaga

SEQ ID NO: 60245 - DNA, 20 bp, Human adenovirus
atggaaacatctaccttggc

SEQ ID NO: 60246 - DNA, 20 bp, Human adenovirus
tggaaacatctaccttggcg

SEQ ID NO: 60247 - DNA, 20 bp, Human adenovirus
gcggaaagccacatcaacca

SEQ ID NO: 60248 - DNA, 20 bp, Human adenovirus
aaggtagttttaatggttgc

SEQ ID NO: 60249 - DNA, 20 bp, Human adenovirus
taatggttgctggttgatgt

SEQ ID NO: 60250 - DNA, 20 bp, Human adenovirus
tacagtgtaaacaattctct

SEQ ID NO: 60251 - DNA, 20 bp, Human adenovirus
acagtgtaaacaattctctc

SEQ ID NO: 60252 - DNA, 20 bp, Human adenovirus
cagtgtaaacaattctctca

SEQ ID NO: 60253 - DNA, 20 bp, Human adenovirus
tctcagtacgggtggcctta

SEQ ID NO: 60254 - DNA, 20 bp, Human adenovirus
aataggggaaagttctcatt

SEQ ID NO: 60255 - DNA, 20 bp, Human adenovirus
gctcatgttttcacagtaag

SEQ ID NO: 60256 - DNA, 20 bp, Human adenovirus
tcacagtaagtgcagcacat

SEQ ID NO: 60257 - DNA, 20 bp, Human adenovirus
cacagtaagtgcagcacata

SEQ ID NO: 60258 - DNA, 20 bp, Human adenovirus
acagtaagtgcagcacataa

SEQ ID NO: 60259 - DNA, 20 bp, Human adenovirus
tgttattcagcagcccataa

SEQ ID NO: 60260 - DNA, 20 bp, Human adenovirus
ttaaaatttttacttccttt

SEQ ID NO: 60261 - DNA, 20 bp, Human adenovirus
taaaatttttacttcctttg

SEQ ID NO: 60262 - DNA, 20 bp, Human adenovirus
aaaatttttacttcctttgt

SEQ ID NO: 60263 - DNA, 20 bp, Human adenovirus
aaatttttacttcctttgtg

SEQ ID NO: 60264 - DNA, 20 bp, Human adenovirus
ttacttcctttgtggtcagg

SEQ ID NO: 60265 - DNA, 20 bp, Human adenovirus
atgctgccttgtctatcatt

SEQ ID NO: 60266 - DNA, 20 bp, Human adenovirus
tctatcatttaaagggggcg

SEQ ID NO: 60267 - DNA, 20 bp, Human adenovirus
aaagggggcggaggcaggat

SEQ ID NO: 60268 - DNA, 20 bp, Human adenovirus
aagggggcggaggcaggatt

SEQ ID NO: 60269 - DNA, 20 bp, Human adenovirus
gaagaaccatttttattcca

SEQ ID NO: 60270 - DNA, 20 bp, Human adenovirus
tcatttttccagccttggat

SEQ ID NO: 60271 - DNA, 20 bp, Human adenovirus
ttccagccttggattatttc

SEQ ID NO: 60272 - DNA, 20 bp, Human adenovirus
tccagccttggattatttct

SEQ ID NO: 60273 - DNA, 20 bp, Human adenovirus
ccagccttggattatttcta

SEQ ID NO: 60274 - DNA, 20 bp, Human adenovirus
cagccttggattatttctac

SEQ ID NO: 60275 - DNA, 20 bp, Human adenovirus
gtgtctccggtaatgccttc

SEQ ID NO: 60276 - DNA, 20 bp, Human adenovirus
tgtctccggtaatgccttcc

SEQ ID NO: 60277 - DNA, 20 bp, Human adenovirus
caaaatgtaagtgataaagc

SEQ ID NO: 60278 - DNA, 20 bp, Human adenovirus
ttctttaatcattttagtaa

SEQ ID NO: 60279 - DNA, 20 bp, Human adenovirus
tctttaatcattttagtaat

SEQ ID NO: 60280 - DNA, 20 bp, Human adenovirus
ttccggcaaaaatcacatcg

SEQ ID NO: 60281 - DNA, 20 bp, Human adenovirus
cggcaaaaatcacatcggac

SEQ ID NO: 60282 - DNA, 20 bp, Human adenovirus
gtatgcccgtggcatggtag

SEQ ID NO: 60283 - DNA, 20 bp, Human adenovirus
aaagccataaatatgccctg

SEQ ID NO: 60284 - DNA, 20 bp, Human adenovirus
aagccataaatatgccctga

SEQ ID NO: 60285 - DNA, 20 bp, Human adenovirus
ctgacctagctgagtactta

SEQ ID NO: 60286 - DNA, 20 bp, Human adenovirus
aaggcaacttacactgacgt

SEQ ID NO: 60287 - DNA, 20 bp, Human adenovirus
cactgacgtaatgacggaag

SEQ ID NO: 60288 - DNA, 20 bp, Human adenovirus
ttttttggcggggtttttac

SEQ ID NO: 60289 - DNA, 20 bp, Human adenovirus
tttttggcggggtttttaca

SEQ ID NO: 60290 - DNA, 20 bp, Human parainfluenza virus 1
tgacacatttagttccagga

SEQ ID NO: 60291 - DNA, 20 bp, Human parainfluenza virus 1
gacacatttagttccaggag

SEQ ID NO: 60292 - DNA, 20 bp, Human parainfluenza virus 1
acacatttagttccaggaga

SEQ ID NO: 60293 - DNA, 20 bp, Human parainfluenza virus 1
agttccaggagaagtgagag

SEQ ID NO: 60294 - DNA, 20 bp, Human parainfluenza virus 1
gttccaggagaagtgagagc

SEQ ID NO: 60295 - DNA, 20 bp, Human parainfluenza virus 1
cttcagacatatggatatcc

SEQ ID NO: 60296 - DNA, 20 bp, Human parainfluenza virus 1
agacatatggatatcctgca

SEQ ID NO: 60297 - DNA, 20 bp, Human parainfluenza virus 1
aagtttggatagtgttggtt

SEQ ID NO: 60298 - DNA, 20 bp, Human parainfluenza virus 1
ggatagtgttggttaaagcc

SEQ ID NO: 60299 - DNA, 20 bp, Human parainfluenza virus 1
gatagtgttggttaaagcca

SEQ ID NO: 60300 - DNA, 20 bp, Human parainfluenza virus 1
atggagactttgcccctgga

SEQ ID NO: 60301 - DNA, 20 bp, Human parainfluenza virus 1
gcccctggaaactatccagc

SEQ ID NO: 60302 - DNA, 20 bp, Human parainfluenza virus 1
cccctggaaactatccagca

SEQ ID NO: 60303 - DNA, 20 bp, Human parainfluenza virus 1
ctgtggtacaaaacaaagct

SEQ ID NO: 60304 - DNA, 20 bp, Human parainfluenza virus 1
cagttacatactgttgcata

SEQ ID NO: 60305 - DNA, 20 bp, Human parainfluenza virus 1
gagtcgaggacactgctgat

SEQ ID NO: 60306 - DNA, 20 bp, Human parainfluenza virus 1
tgtggttgctgatcgagtga

SEQ ID NO: 60307 - DNA, 20 bp, Human parainfluenza virus 1
ctgatcgagtgattcatcca

SEQ ID NO: 60308 - DNA, 20 bp, Human parainfluenza virus 1
atccatctttcattgctgtc

SEQ ID NO: 60309 - DNA, 20 bp, Human parainfluenza virus 1
cattgctgtcatttgtccag

SEQ ID NO: 60310 - DNA, 20 bp, Human parainfluenza virus 1
aattcctcctatccctgcag

SEQ ID NO: 60311 - DNA, 20 bp, Human parainfluenza virus 1
ctcctatccctgcagccgct

SEQ ID NO: 60312 - DNA, 20 bp, Human parainfluenza virus 1
tcatagtcagcatcactgct

SEQ ID NO: 60313 - DNA, 20 bp, Human parainfluenza virus 1
attgtttgcctggcttagtc

SEQ ID NO: 60314 - DNA, 20 bp, Human parainfluenza virus 1
ttgtttgcctggcttagtct

SEQ ID NO: 60315 - DNA, 20 bp, Human parainfluenza virus 1
acgtcgtcttatcctacaag

SEQ ID NO: 60316 - DNA, 20 bp, Human parainfluenza virus 1
tcctacaagcccacagaaat

SEQ ID NO: 60317 - DNA, 20 bp, Human parainfluenza virus 1
gagaagacagaagctggctc

SEQ ID NO: 60318 - DNA, 20 bp, Human parainfluenza virus 1
ttttcttttgggttgtcgat

SEQ ID NO: 60319 - DNA, 20 bp, Human parainfluenza virus 1
tcttttgggttgtcgatgat

SEQ ID NO: 60320 - DNA, 20 bp, Human parainfluenza virus 1
atcaacaaggtatacacagg

SEQ ID NO: 60321 - DNA, 20 bp, Human parainfluenza virus 1
ggactagttcctcgcctaga

SEQ ID NO: 60322 - DNA, 20 bp, Human parainfluenza virus 1
gactagttcctcgcctagag

SEQ ID NO: 60323 - DNA, 20 bp, Human parainfluenza virus 1
ctcgcctagaggccctgtgt

SEQ ID NO: 60324 - DNA, 20 bp, Human parainfluenza virus 1
ttgatcaaggattctagcat

SEQ ID NO: 60325 - DNA, 20 bp, Human parainfluenza virus 1
ccaacccaagtccagagctt

SEQ ID NO: 60326 - DNA, 20 bp, Human parainfluenza virus 1
aagatgccgttctacaaagg

SEQ ID NO: 60327 - DNA, 20 bp, Human parainfluenza virus 1
tacaaaggaacaaaagacgg

SEQ ID NO: 60328 - DNA, 20 bp, Human parainfluenza virus 1
tgttcctttgtagaacggca

SEQ ID NO: 60329 - DNA, 20 bp, Human parainfluenza virus 1
gttcctttgtagaacggcat

SEQ ID NO: 60330 - DNA, 20 bp, Human parainfluenza virus 1
caccgtcaaagaacgaagag

SEQ ID NO: 60331 - DNA, 20 bp, Human parainfluenza virus 1
gcattgtttgttgtgtatct

SEQ ID NO: 60332 - DNA, 20 bp, Human parainfluenza virus 1
cattgtttgttgtgtatctt

SEQ ID NO: 60333 - DNA, 20 bp, Human parainfluenza virus 1
tttgttgtgtatcttgtttt

SEQ ID NO: 60334 - DNA, 20 bp, Human parainfluenza virus 1
gttgtgtatcttgtttttct

SEQ ID NO: 60335 - DNA, 20 bp, Human parainfluenza virus 1
acaaaagggaaagacaataa

SEQ ID NO: 60336 - DNA, 20 bp, Human parainfluenza virus 1
gacccctctatggaagctct

SEQ ID NO: 60337 - DNA, 20 bp, Human parainfluenza virus 1
acccctctatggaagctcta

SEQ ID NO: 60338 - DNA, 20 bp, Human parainfluenza virus 1
aactcttgacctcctagagc

SEQ ID NO: 60339 - DNA, 20 bp, Human parainfluenza virus 1
acctcctagagcttccatag

SEQ ID NO: 60340 - DNA, 20 bp, Human parainfluenza virus 1
cccagattctcacacgaaga

SEQ ID NO: 60341 - DNA, 20 bp, Human parainfluenza virus 1
tcacacgaagaaaatgggac

SEQ ID NO: 60342 - DNA, 20 bp, Human parainfluenza virus 1
cttttttgtcaggacctgtt

SEQ ID NO: 60343 - DNA, 20 bp, Human parainfluenza virus 1
tttgtcaggacctgttttga

SEQ ID NO: 60344 - DNA, 20 bp, Human parainfluenza virus 1
ttgtcaggacctgttttgag

SEQ ID NO: 60345 - DNA, 20 bp, Human parainfluenza virus 1
gatctggagaaatgatagta

SEQ ID NO: 60346 - DNA, 20 bp, Human parainfluenza virus 1
gatccatgctcctctactac

SEQ ID NO: 60347 - DNA, 20 bp, Human parainfluenza virus 1
tatatcatcccttgtctcag

SEQ ID NO: 60348 - DNA, 20 bp, Human parainfluenza virus 1
tctcagtcggctggaccatg

SEQ ID NO: 60349 - DNA, 20 bp, Human parainfluenza virus 1
ctccagatctaactgttctt

SEQ ID NO: 60350 - DNA, 20 bp, Human parainfluenza virus 1
caattgctaaggtcccaaaa

SEQ ID NO: 60351 - DNA, 20 bp, Human parainfluenza virus 1
ctaaggtcccaaaaactctt

SEQ ID NO: 60352 - DNA, 20 bp, Human parainfluenza virus 1
cagatcttgcattaccgaac

SEQ ID NO: 60353 - DNA, 20 bp, Human parainfluenza virus 1
cattaccgaactcaatatca

SEQ ID NO: 60354 - DNA, 20 bp, Human parainfluenza virus 1
ccgaactcaatatcagtgaa

SEQ ID NO: 60355 - DNA, 20 bp, Human parainfluenza virus 1
catggaaaaaagcagtttgc

SEQ ID NO: 60356 - DNA, 20 bp, Human parainfluenza virus 1
gctatcctttaatggatgta

SEQ ID NO: 60357 - DNA, 20 bp, Human parainfluenza virus 1
ctatcctttaatggatgtaa

SEQ ID NO: 60358 - DNA, 20 bp, Human parainfluenza virus 1
aatggatgtaaatccacata

SEQ ID NO: 60359 - DNA, 20 bp, Human parainfluenza virus 1
atggatgtaaatccacatat

SEQ ID NO: 60360 - DNA, 20 bp, Human parainfluenza virus 1
tccttttctttctttgtgtt

SEQ ID NO: 60361 - DNA, 20 bp, Human parainfluenza virus 1
tctttctttgtgttgttgtt

SEQ ID NO: 60362 - DNA, 20 bp, Human parainfluenza virus 1
ctttctttgtgttgttgttt

SEQ ID NO: 60363 - DNA, 20 bp, Human parainfluenza virus 1
tttctttgtgttgttgtttt

SEQ ID NO: 60364 - DNA, 20 bp, Human parainfluenza virus 1
ctttgtgttgttgtttttct

SEQ ID NO: 60365 - DNA, 20 bp, Human parainfluenza virus 1
tttggtgctgtcattggtac

SEQ ID NO: 60366 - DNA, 20 bp, Human parainfluenza virus 1
ggtgctgtcattggtaccat

SEQ ID NO: 60367 - DNA, 20 bp, Human parainfluenza virus 1
gtgctgtcattggtaccata

SEQ ID NO: 60368 - DNA, 20 bp, Human parainfluenza virus 1
gtaccatagcactaggagta

SEQ ID NO: 60369 - DNA, 20 bp, Human parainfluenza virus 1
tttgagcagctgtggctact

SEQ ID NO: 60370 - DNA, 20 bp, Human parainfluenza virus 1
taagtacaactaaaaaggat

SEQ ID NO: 60371 - DNA, 20 bp, Human parainfluenza virus 1
acactgaacaggttaaggga

SEQ ID NO: 60372 - DNA, 20 bp, Human parainfluenza virus 1
cactgaacaggttaagggaa

SEQ ID NO: 60373 - DNA, 20 bp, Human parainfluenza virus 1
agggaactgtgatagatgtt

SEQ ID NO: 60374 - DNA, 20 bp, Human parainfluenza virus 1
atttggaaaaatacatggtt

SEQ ID NO: 60375 - DNA, 20 bp, Human parainfluenza virus 1
cattcttgacctataccaat

SEQ ID NO: 60376 - DNA, 20 bp, Human parainfluenza virus 1
ttgacctataccaattgcgg

SEQ ID NO: 60377 - DNA, 20 bp, Human parainfluenza virus 1
acctataccaattgcggttt

SEQ ID NO: 60378 - DNA, 20 bp, Human parainfluenza virus 1
cggtttaataggtataaatg

SEQ ID NO: 60379 - DNA, 20 bp, Human parainfluenza virus 1
aataggtataaatggaatag

SEQ ID NO: 60380 - DNA, 20 bp, Human parainfluenza virus 1
accaatcaggtgtacaacaa

SEQ ID NO: 60381 - DNA, 20 bp, Human parainfluenza virus 1
gggttaaagacaatccagtc

SEQ ID NO: 60382 - DNA, 20 bp, Human parainfluenza virus 1
aagacaatccagtcaaccta

SEQ ID NO: 60383 - DNA, 20 bp, Human parainfluenza virus 1
tacaaacgatggctgaaaaa

SEQ ID NO: 60384 - DNA, 20 bp, Human parainfluenza virus 1
ttcagccatcgtttgtataa

SEQ ID NO: 60385 - DNA, 20 bp, Human parainfluenza virus 1
ctggagatgtcccgtagggg

SEQ ID NO: 60386 - DNA, 20 bp, Human parainfluenza virus 1
tggagatgtcccgtagggga

SEQ ID NO: 60387 - DNA, 20 bp, Human parainfluenza virus 1
ttacctggaccaagtctact

SEQ ID NO: 60388 - DNA, 20 bp, Human parainfluenza virus 1
cctggaccaagtctactttc

SEQ ID NO: 60389 - DNA, 20 bp, Human parainfluenza virus 1
ctggatccaccacaatttca

SEQ ID NO: 60390 - DNA, 20 bp, Human parainfluenza virus 1
tgtaatagctgcaggaacaa

SEQ ID NO: 60391 - DNA, 20 bp, Human parainfluenza virus 1
tcagttatgctccttgccca

SEQ ID NO: 60392 - DNA, 20 bp, Human parainfluenza virus 1
tgctccttgcccactgtgaa

SEQ ID NO: 60393 - DNA, 20 bp, Human parainfluenza virus 1
cccactgtgaatgagactac

SEQ ID NO: 60394 - DNA, 20 bp, Human parainfluenza virus 1
acagtgggcaaggagcataa

SEQ ID NO: 60395 - DNA, 20 bp, Human parainfluenza virus 1
aaaatacactcattttccta

SEQ ID NO: 60396 - DNA, 20 bp, Human parainfluenza virus 1
tcctagggtacggtggctta

SEQ ID NO: 60397 - DNA, 20 bp, Human parainfluenza virus 1
cctagggtacggtggcttaa

SEQ ID NO: 60398 - DNA, 20 bp, Human parainfluenza virus 1
ctagggtacggtggcttaac

SEQ ID NO: 60399 - DNA, 20 bp, Human parainfluenza virus 1
acaactccgctccaaggcga

SEQ ID NO: 60400 - DNA, 20 bp, Human parainfluenza virus 1
aggttggcactccaacctgc

SEQ ID NO: 60401 - DNA, 20 bp, Human parainfluenza virus 1
gcactccaacctgcaaatag

SEQ ID NO: 60402 - DNA, 20 bp, Human parainfluenza virus 1
gatatcaacaaccccatgac

SEQ ID NO: 60403 - DNA, 20 bp, Human parainfluenza virus 1
aatggtcatggggttgttga

SEQ ID NO: 60404 - DNA, 20 bp, Human parainfluenza virus 1
atggtcatggggttgttgat

SEQ ID NO: 60405 - DNA, 20 bp, Human parainfluenza virus 1
ctacaaccacactgtacgca

SEQ ID NO: 60406 - DNA, 20 bp, Human parainfluenza virus 1
atcccaccataatgtactca

SEQ ID NO: 60407 - DNA, 20 bp, Human parainfluenza virus 1
tcaacatgctaagactcaag

SEQ ID NO: 60408 - DNA, 20 bp, Human parainfluenza virus 1
tacattcttgagtcttagca

SEQ ID NO: 60409 - DNA, 20 bp, Human parainfluenza virus 1
ttgagtcttagcatgttgat

SEQ ID NO: 60410 - DNA, 20 bp, Human parainfluenza virus 1
aacaagaaattaaggatatt

SEQ ID NO: 60411 - DNA, 20 bp, Human parainfluenza virus 1
aggatattgatcgttacact

SEQ ID NO: 60412 - DNA, 20 bp, Human parainfluenza virus 1
atcgttacacttttgaacct

SEQ ID NO: 60413 - DNA, 20 bp, Human parainfluenza virus 1
cacttttgaaccttatccga

SEQ ID NO: 60414 - DNA, 20 bp, Human parainfluenza virus 1
tgaaccttatccgattttct

SEQ ID NO: 60415 - DNA, 20 bp, Human parainfluenza virus 1
agctggacgactcgataaaa

SEQ ID NO: 60416 - DNA, 20 bp, Human parainfluenza virus 1
tgggagcttatcgactcttt

SEQ ID NO: 60417 - DNA, 20 bp, Human parainfluenza virus 1
tcgactctttatttcccaat

SEQ ID NO: 60418 - DNA, 20 bp, Human parainfluenza virus 1
atttcccaatcttggtgagg

SEQ ID NO: 60419 - DNA, 20 bp, Human parainfluenza virus 1
tttcccaatcttggtgagga

SEQ ID NO: 60420 - DNA, 20 bp, Human parainfluenza virus 1
gcagaaacactactagcaaa

SEQ ID NO: 60421 - DNA, 20 bp, Human parainfluenza virus 1
ttcagtgaaaatgggatggt

SEQ ID NO: 60422 - DNA, 20 bp, Human parainfluenza virus 1
agtgaaaatgggatggtaaa

SEQ ID NO: 60423 - DNA, 20 bp, Human parainfluenza virus 1
acctactaaagagactgact

SEQ ID NO: 60424 - DNA, 20 bp, Human parainfluenza virus 1
agtaggtcaatttctccctt

SEQ ID NO: 60425 - DNA, 20 bp, Human parainfluenza virus 1
gtgtcagagtgtcagcaatg

SEQ ID NO: 60426 - DNA, 20 bp, Human parainfluenza virus 1
ctgtcacacaaacctataag

SEQ ID NO: 60427 - DNA, 20 bp, Human parainfluenza virus 1
ttttgcttataggtttgtgt

SEQ ID NO: 60428 - DNA, 20 bp, Human parainfluenza virus 1
tttgcttataggtttgtgtg

SEQ ID NO: 60429 - DNA, 20 bp, Human parainfluenza virus 1
ttgcttataggtttgtgtga

SEQ ID NO: 60430 - DNA, 20 bp, Human parainfluenza virus 1
atcccagctaacataggagg

SEQ ID NO: 60431 - DNA, 20 bp, Human parainfluenza virus 1
aactatatgtctacagctag

SEQ ID NO: 60432 - DNA, 20 bp, Human parainfluenza virus 1
tgtcagaaatataggtgatc

SEQ ID NO: 60433 - DNA, 20 bp, Human parainfluenza virus 1
gtcagaaatataggtgatcc

SEQ ID NO: 60434 - DNA, 20 bp, Human parainfluenza virus 1
tcagaaatataggtgatcca

SEQ ID NO: 60435 - DNA, 20 bp, Human parainfluenza virus 1
gcaataggattgaggcaaaa

SEQ ID NO: 60436 - DNA, 20 bp, Human parainfluenza virus 1
aggcaaaaaatgtggtttca

SEQ ID NO: 60437 - DNA, 20 bp, Human parainfluenza virus 1
catctaacttatggaagacc

SEQ ID NO: 60438 - DNA, 20 bp, Human parainfluenza virus 1
atctaacttatggaagacca

SEQ ID NO: 60439 - DNA, 20 bp, Human parainfluenza virus 1
tggaagaccaatccacggtt

SEQ ID NO: 60440 - DNA, 20 bp, Human parainfluenza virus 1
tagctcaaaccagggctaac

SEQ ID NO: 60441 - DNA, 20 bp, Human parainfluenza virus 1
agtttagagaatttgaagtt

SEQ ID NO: 60442 - DNA, 20 bp, Human parainfluenza virus 1
agagaatttgaagttactca

SEQ ID NO: 60443 - DNA, 20 bp, Human parainfluenza virus 1
gagaatttgaagttactcac

SEQ ID NO: 60444 - DNA, 20 bp, Human parainfluenza virus 1
gaagttactcacccctgtat

SEQ ID NO: 60445 - DNA, 20 bp, Human parainfluenza virus 1
gcatattcactttacgggtt

SEQ ID NO: 60446 - DNA, 20 bp, Human parainfluenza virus 1
catattcactttacgggtta

SEQ ID NO: 60447 - DNA, 20 bp, Human parainfluenza virus 1
actttacgggttaaacgtca

SEQ ID NO: 60448 - DNA, 20 bp, Human parainfluenza virus 1
acgggttaaacgtcagaggg

SEQ ID NO: 60449 - DNA, 20 bp, Human parainfluenza virus 1
cgggttaaacgtcagaggga

SEQ ID NO: 60450 - DNA, 20 bp, Human parainfluenza virus 1
gaggactgggatcctgatgc

SEQ ID NO: 60451 - DNA, 20 bp, Human parainfluenza virus 1
aacacaatatacctttaaag

SEQ ID NO: 60452 - DNA, 20 bp, Human parainfluenza virus 1
aaagaagaacgaaagaactc

SEQ ID NO: 60453 - DNA, 20 bp, Human parainfluenza virus 1
aagaagaacgaaagaactcc

SEQ ID NO: 60454 - DNA, 20 bp, Human parainfluenza virus 1
tttcgttcttctttaaaggt

SEQ ID NO: 60455 - DNA, 20 bp, Human parainfluenza virus 1
tcgggattaatagcaccagt

SEQ ID NO: 60456 - DNA, 20 bp, Human parainfluenza virus 1
cgggattaatagcaccagtt

SEQ ID NO: 60457 - DNA, 20 bp, Human parainfluenza virus 1
gggattaatagcaccagttg

SEQ ID NO: 60458 - DNA, 20 bp, Human parainfluenza virus 1
atagcaccagttgtttgaaa

SEQ ID NO: 60459 - DNA, 20 bp, Human parainfluenza virus 1
tttgaaagcattggaactta

SEQ ID NO: 60460 - DNA, 20 bp, Influenza A virus
cttttcttgaaagttccagc

SEQ ID NO: 60461 - DNA, 20 bp, Influenza A virus
tcttgaaagttccagcgcaa

SEQ ID NO: 60462 - DNA, 20 bp, Influenza A virus
cttgaaagttccagcgcaaa

SEQ ID NO: 60463 - DNA, 20 bp, Influenza A virus
ttgaaagttccagcgcaaaa

SEQ ID NO: 60464 - DNA, 20 bp, Influenza A virus
aaagttccagcgcaaaatgc

SEQ ID NO: 60465 - DNA, 20 bp, Influenza A virus
gaaaattcgtgtcttgaaac

SEQ ID NO: 60466 - DNA, 20 bp, Influenza A virus
aaaattcgtgtcttgaaacg

SEQ ID NO: 60467 - DNA, 20 bp, Influenza A virus
gtgtcttgaaacgatggaag

SEQ ID NO: 60468 - DNA, 20 bp, Influenza A virus
aaacgatggaagttattcaa

SEQ ID NO: 60469 - DNA, 20 bp, Influenza A virus
ttcaacaaacaagagtggac

SEQ ID NO: 60470 - DNA, 20 bp, Influenza A virus
caaagaaaaagaagagtaag

SEQ ID NO: 60471 - DNA, 20 bp, Influenza A virus
gcttcttctttcctattgtt

SEQ ID NO: 60472 - DNA, 20 bp, Influenza A virus
cttcttctttcctattgttc

SEQ ID NO: 60473 - DNA, 20 bp, Influenza A virus
ttctttcctattgttcgttg

SEQ ID NO: 60474 - DNA, 20 bp, Influenza A virus
tttcctattgttcgttgtgt

SEQ ID NO: 60475 - DNA, 20 bp, Influenza A virus
aacagtctgggcttccggtt

SEQ ID NO: 60476 - DNA, 20 bp, Influenza A virus
cggttggaggtaatgaaaag

SEQ ID NO: 60477 - DNA, 20 bp, Influenza A virus
gaggtaatgaaaagaaggct

SEQ ID NO: 60478 - DNA, 20 bp, Influenza A virus
ttagaaaaatgatgactaat

SEQ ID NO: 60479 - DNA, 20 bp, Influenza A virus
gaaaaatgatgactaattca

SEQ ID NO: 60480 - DNA, 20 bp, Influenza A virus
tcaaataaaatggctagact

SEQ ID NO: 60481 - DNA, 20 bp, Influenza A virus
catgttcgaaagcaagagca

SEQ ID NO: 60482 - DNA, 20 bp, Influenza A virus
gaaagcaagagcatgaagct

SEQ ID NO: 60483 - DNA, 20 bp, Influenza A virus
ctagcatttctgctggtatt

SEQ ID NO: 60484 - DNA, 20 bp, Influenza A virus
ctgctggtatttgtgttcgg

SEQ ID NO: 60485 - DNA, 20 bp, Influenza A virus
gctctcatagtgaatgcacc

SEQ ID NO: 60486 - DNA, 20 bp, Influenza A virus
ggtgcattcactatgagagc

SEQ ID NO: 60487 - DNA, 20 bp, Influenza A virus
gtgcattcactatgagagcg

SEQ ID NO: 60488 - DNA, 20 bp, Influenza A virus
actatgagagcgaagtcatc

SEQ ID NO: 60489 - DNA, 20 bp, Influenza A virus
gagtccgtcccaccagtatg

SEQ ID NO: 60490 - DNA, 20 bp, Influenza A virus
ggagtgtctggaattaatga

SEQ ID NO: 60491 - DNA, 20 bp, Influenza A virus
gagtgtctggaattaatgaa

SEQ ID NO: 60492 - DNA, 20 bp, Influenza A virus
atgaatcggctgatatgagc

SEQ ID NO: 60493 - DNA, 20 bp, Influenza A virus
gggtaacagtgataaagaac

SEQ ID NO: 60494 - DNA, 20 bp, Influenza A virus
ctggcccaaggtcattattt

SEQ ID NO: 60495 - DNA, 20 bp, Influenza A virus
aaatgggagctaatggatga

SEQ ID NO: 60496 - DNA, 20 bp, Influenza A virus
gtaatcccctgaatccattt

SEQ ID NO: 60497 - DNA, 20 bp, Influenza A virus
taatcccctgaatccatttg

SEQ ID NO: 60498 - DNA, 20 bp, Influenza A virus
gtcagtcataaggaaattga

SEQ ID NO: 60499 - DNA, 20 bp, Influenza A virus
tcagtcataaggaaattgag

SEQ ID NO: 60500 - DNA, 20 bp, Influenza A virus
caatctatttgagaaattct

SEQ ID NO: 60501 - DNA, 20 bp, Influenza A virus
gagaaattcttccctagcag

SEQ ID NO: 60502 - DNA, 20 bp, Influenza A virus
agaaattcttccctagcagt

SEQ ID NO: 60503 - DNA, 20 bp, Influenza A virus
ttccctagcagttcgtacag

SEQ ID NO: 60504 - DNA, 20 bp, Influenza A virus
cctagcagttcgtacaggag

SEQ ID NO: 60505 - DNA, 20 bp, Human papillomavirus 61
tcctgctctgcaaggactac

SEQ ID NO: 60506 - DNA, 20 bp, Human papillomavirus 61
cctgctctgcaaggactacg

SEQ ID NO: 60507 - DNA, 20 bp, Human papillomavirus 61
ctgctctgcaaggactacga

SEQ ID NO: 60508 - DNA, 20 bp, Human papillomavirus 61
gaggatttaaggctgacatg

SEQ ID NO: 60509 - DNA, 20 bp, Human papillomavirus 61
aggatttaaggctgacatgt

SEQ ID NO: 60510 - DNA, 20 bp, Human papillomavirus 61
ggaccattcctgttacggac

SEQ ID NO: 60511 - DNA, 20 bp, Human papillomavirus 61
ctgttacggacccactgtgg

SEQ ID NO: 60512 - DNA, 20 bp, Human papillomavirus 61
cggacccactgtggaacaga

SEQ ID NO: 60513 - DNA, 20 bp, Human papillomavirus 61
gctgaactatatatacggtg

SEQ ID NO: 60514 - DNA, 20 bp, Human papillomavirus 61
tcctgtatacttaacggttt

SEQ ID NO: 60515 - DNA, 20 bp, Human papillomavirus 61
ttagacagctcagagtcaga

SEQ ID NO: 60516 - DNA, 20 bp, Human papillomavirus 61
gacagctcagagtcagagga

SEQ ID NO: 60517 - DNA, 20 bp, Human papillomavirus 61
ttgaacaagcacagcaggcc

SEQ ID NO: 60518 - DNA, 20 bp, Human papillomavirus 61
aacaagcacagcaggcctac

SEQ ID NO: 60519 - DNA, 20 bp, Human papillomavirus 61
ctacctgtggcatttgtaag

SEQ ID NO: 60520 - DNA, 20 bp, Human papillomavirus 61
gtaatttaaaagcaaaatta

SEQ ID NO: 60521 - DNA, 20 bp, Human papillomavirus 61
aaaagcaaaattactgtaca

SEQ ID NO: 60522 - DNA, 20 bp, Human papillomavirus 61
aaagcaaaattactgtacaa

SEQ ID NO: 60523 - DNA, 20 bp, Human papillomavirus 61
ctgtacaaattcaaggacct

SEQ ID NO: 60524 - DNA, 20 bp, Human papillomavirus 61
aaggacctatttggactagc

SEQ ID NO: 60525 - DNA, 20 bp, Human papillomavirus 61
aacataccggaaagacagat

SEQ ID NO: 60526 - DNA, 20 bp, Human papillomavirus 61
aaccaccaaagattagaagc

SEQ ID NO: 60527 - DNA, 20 bp, Human papillomavirus 61
gaagcgcaccgtgcgcacta

SEQ ID NO: 60528 - DNA, 20 bp, Human papillomavirus 61
gtatagaacagccatgggaa

SEQ ID NO: 60529 - DNA, 20 bp, Human papillomavirus 61
cccatggctgttctatacca

SEQ ID NO: 60530 - DNA, 20 bp, Human papillomavirus 61
ctgggaaatgaggacccaaa

SEQ ID NO: 60531 - DNA, 20 bp, Human papillomavirus 61
ttggccagtaactgccaagc

SEQ ID NO: 60532 - DNA, 20 bp, Human papillomavirus 61
gccagtaactgccaagcaaa

SEQ ID NO: 60533 - DNA, 20 bp, Human papillomavirus 61
aatatactttgcttggcagt

SEQ ID NO: 60534 - DNA, 20 bp, Human papillomavirus 61
atatactttgcttggcagtt

SEQ ID NO: 60535 - DNA, 20 bp, Human papillomavirus 61
tacggaccaagcgacacagg

SEQ ID NO: 60536 - DNA, 20 bp, Human papillomavirus 61
acggaccaagcgacacaggg

SEQ ID NO: 60537 - DNA, 20 bp, Human papillomavirus 61
cggaccaagcgacacaggga

SEQ ID NO: 60538 - DNA, 20 bp, Human papillomavirus 61
tgcatgagcctactaaattt

SEQ ID NO: 60539 - DNA, 20 bp, Human papillomavirus 61
gcatgagcctactaaatttt

SEQ ID NO: 60540 - DNA, 20 bp, Human papillomavirus 61
agatgcgtgccaggagaaat

SEQ ID NO: 60541 - DNA, 20 bp, Human papillomavirus 61
gatgcgtgccaggagaaatt

SEQ ID NO: 60542 - DNA, 20 bp, Human papillomavirus 61
ctagacctctatgaaaaaga

SEQ ID NO: 60543 - DNA, 20 bp, Human papillomavirus 61
aggaccaaatattgcattgg

SEQ ID NO: 60544 - DNA, 20 bp, Human papillomavirus 61
ggtcctcaagcttgttgcta

SEQ ID NO: 60545 - DNA, 20 bp, Human papillomavirus 61
caaaccacctctttggaaat

SEQ ID NO: 60546 - DNA, 20 bp, Human papillomavirus 61
ggaaatgtggaatacgcagc

SEQ ID NO: 60547 - DNA, 20 bp, Human papillomavirus 61
gaaatgtggaatacgcagcc

SEQ ID NO: 60548 - DNA, 20 bp, Human papillomavirus 61
tttcttccagcatcgttgtg

SEQ ID NO: 60549 - DNA, 20 bp, Human papillomavirus 61
ttcttccagcatcgttgtgg

SEQ ID NO: 60550 - DNA, 20 bp, Human papillomavirus 61
ttggtgtttttctgtgccat

SEQ ID NO: 60551 - DNA, 20 bp, Human papillomavirus 61
tggtgtttttctgtgccata

SEQ ID NO: 60552 - DNA, 20 bp, Human papillomavirus 61
ggtgtttttctgtgccatat

SEQ ID NO: 60553 - DNA, 20 bp, Human papillomavirus 61
gtgtttttctgtgccatata

SEQ ID NO: 60554 - DNA, 20 bp, Human papillomavirus 61
ttctgtgccatatatgtagg

SEQ ID NO: 60555 - DNA, 20 bp, Human papillomavirus 61
gcacccggcctcctactgta

SEQ ID NO: 60556 - DNA, 20 bp, Human papillomavirus 61
gccctgtgtcccgcccccct

SEQ ID NO: 60557 - DNA, 20 bp, Human papillomavirus 61
tattaatcctttattcactg

SEQ ID NO: 60558 - DNA, 20 bp, Human papillomavirus 61
attaatcctttattcactga

SEQ ID NO: 60559 - DNA, 20 bp, Human papillomavirus 61
ttaatcctttattcactgag

SEQ ID NO: 60560 - DNA, 20 bp, Human papillomavirus 61
atcctttattcactgagcct

SEQ ID NO: 60561 - DNA, 20 bp, Human papillomavirus 61
attcactgagccttctatta

SEQ ID NO: 60562 - DNA, 20 bp, Human papillomavirus 61
accatgacattagtcccatt

SEQ ID NO: 60563 - DNA, 20 bp, Human papillomavirus 61
ccatgacattagtcccattc

SEQ ID NO: 60564 - DNA, 20 bp, Human papillomavirus 61
gtcccattccatcggatgct

SEQ ID NO: 60565 - DNA, 20 bp, Human papillomavirus 61
catcggatgctgtggagtta

SEQ ID NO: 60566 - DNA, 20 bp, Human papillomavirus 61
cagcctttggtgccgtcctc

SEQ ID NO: 60567 - DNA, 20 bp, Human papillomavirus 61
tatatatattcagggctctg

SEQ ID NO: 60568 - DNA, 20 bp, Human papillomavirus 61
agggctctgatttttatttg

SEQ ID NO: 60569 - DNA, 20 bp, Human papillomavirus 61
ttatttgttgcctgcttatg

SEQ ID NO: 60570 - DNA, 20 bp, Human papillomavirus 61
tatttgttgcctgcttatgt

SEQ ID NO: 60571 - DNA, 20 bp, Human papillomavirus 61
atttgttgcctgcttatgtg

SEQ ID NO: 60572 - DNA, 20 bp, Human papillomavirus 61
ctgtaggacatccctattgt

SEQ ID NO: 60573 - DNA, 20 bp, Human papillomavirus 61
tagtttgcagcttgatgggc

SEQ ID NO: 60574 - DNA, 20 bp, Human papillomavirus 61
gcagcttgatgggctgcagg

SEQ ID NO: 60575 - DNA, 20 bp, Human papillomavirus 61
cagcttgatgggctgcaggg

SEQ ID NO: 60576 - DNA, 20 bp, Human papillomavirus 61
atgggctgcagggcaagaaa

SEQ ID NO: 60577 - DNA, 20 bp, Human papillomavirus 61
gatatttgcaccactatatg

SEQ ID NO: 60578 - DNA, 20 bp, Human papillomavirus 61
gcaccactatatgcaagtat

SEQ ID NO: 60579 - DNA, 20 bp, Human papillomavirus 61
caccactatatgcaagtatc

SEQ ID NO: 60580 - DNA, 20 bp, Human papillomavirus 61
tttacaaatggctgctgaac

SEQ ID NO: 60581 - DNA, 20 bp, Human papillomavirus 61
acaaatggctgctgaaccat

SEQ ID NO: 60582 - DNA, 20 bp, Human papillomavirus 61
gctgcaacgtgcccagggcc

SEQ ID NO: 60583 - DNA, 20 bp, Human papillomavirus 61
gttggtttaatgaattgttt

SEQ ID NO: 60584 - DNA, 20 bp, Human papillomavirus 61
ttggtttaatgaattgtttg

SEQ ID NO: 60585 - DNA, 20 bp, Human papillomavirus 61
gtttaatgaattgtttgtaa

SEQ ID NO: 60586 - DNA, 20 bp, Human papillomavirus 61
aatgaattgtttgtaaccgt

SEQ ID NO: 60587 - DNA, 20 bp, Human papillomavirus 61
ggtgtggtaccaccaccctc

SEQ ID NO: 60588 - DNA, 20 bp, Human papillomavirus 61
gtgtggtaccaccaccctct

SEQ ID NO: 60589 - DNA, 20 bp, Human papillomavirus 61
agaagacacatataggtttt

SEQ ID NO: 60590 - DNA, 20 bp, Human papillomavirus 61
gaagacacatataggttttt

SEQ ID NO: 60591 - DNA, 20 bp, Human papillomavirus 61
ttgcagtccagagctattac

SEQ ID NO: 60592 - DNA, 20 bp, Human papillomavirus 61
gtctgtatgctgttgttgtg

SEQ ID NO: 60593 - DNA, 20 bp, Human papillomavirus 61
tctgtatgctgttgttgtgc

SEQ ID NO: 60594 - DNA, 20 bp, Human papillomavirus 61
ttgtgcatgtgttgttttgt

SEQ ID NO: 60595 - DNA, 20 bp, Human papillomavirus 61
tgcatgtgttgttttgtatt

SEQ ID NO: 60596 - DNA, 20 bp, Human papillomavirus 61
ttttgtattgtgctgtactg

SEQ ID NO: 60597 - DNA, 20 bp, Human papillomavirus 61
attgttgcacgccttatttt

SEQ ID NO: 60598 - DNA, 20 bp, Human papillomavirus 61
ttgttgcacgccttattttg

SEQ ID NO: 60599 - DNA, 20 bp, Human papillomavirus 61
ttgcacgccttattttgtgc

SEQ ID NO: 60600 - DNA, 20 bp, Human papillomavirus 61
cacgccttattttgtgcagc

SEQ ID NO: 60601 - DNA, 20 bp, Human papillomavirus 61
ttttgtgcagcttccccatt

SEQ ID NO: 60602 - DNA, 20 bp, Human papillomavirus 61
ctaacacacacagtttggaa

SEQ ID NO: 60603 - DNA, 20 bp, Human papillomavirus 61
ggaacaatgctccatctatc

SEQ ID NO: 60604 - DNA, 20 bp, Human papillomavirus 61
gaacaatgctccatctatct

SEQ ID NO: 60605 - DNA, 20 bp, Human papillomavirus 61
tttgacatgttgtgcaatta

SEQ ID NO: 60606 - DNA, 20 bp, Human papillomavirus 61
ttgacatgttgtgcaattac

SEQ ID NO: 60607 - DNA, 20 bp, Human herpesvirus
cgttgtagatctggatacac

SEQ ID NO: 60608 - DNA, 20 bp, Human herpesvirus
tagatctggatacactactt

SEQ ID NO: 60609 - DNA, 20 bp, Human herpesvirus
tgcccgcaatataacagcaa

SEQ ID NO: 60610 - DNA, 20 bp, Human herpesvirus
acaaggtgggacgtggtctg

SEQ ID NO: 60611 - DNA, 20 bp, Human herpesvirus
caaggtgggacgtggtctga

SEQ ID NO: 60612 - DNA, 20 bp, Human herpesvirus
caacgctcaaactatacaga

SEQ ID NO: 60613 - DNA, 20 bp, Human herpesvirus
aacgctcaaactatacagaa

SEQ ID NO: 60614 - DNA, 20 bp, Human herpesvirus
aggctttgttggaggttctg

SEQ ID NO: 60615 - DNA, 20 bp, Human herpesvirus
gttggaggttctgtatagtt

SEQ ID NO: 60616 - DNA, 20 bp, Human herpesvirus
ttggaggttctgtatagttt

SEQ ID NO: 60617 - DNA, 20 bp, Human herpesvirus
cacacaacaggcggactcta

SEQ ID NO: 60618 - DNA, 20 bp, Human herpesvirus
ggtctggcagcccatgtccg

SEQ ID NO: 60619 - DNA, 20 bp, Human herpesvirus
gtctggcagcccatgtccgc

SEQ ID NO: 60620 - DNA, 20 bp, Human herpesvirus
acctgactcacgctcagggc

SEQ ID NO: 60621 - DNA, 20 bp, Human herpesvirus
ccgctgtcgccctgagcgtg

SEQ ID NO: 60622 - DNA, 20 bp, Human herpesvirus
tccgagccgccattggccca

SEQ ID NO: 60623 - DNA, 20 bp, Human herpesvirus
ccgagccgccattggcccat

SEQ ID NO: 60624 - DNA, 20 bp, Human herpesvirus
cgagccgccattggcccatt

SEQ ID NO: 60625 - DNA, 20 bp, Human herpesvirus
gcccattcggccgaccaatc

SEQ ID NO: 60626 - DNA, 20 bp, Human herpesvirus
ggccgaccaatcccgttcga

SEQ ID NO: 60627 - DNA, 20 bp, Human herpesvirus
gtcgttgcacccatcccccc

SEQ ID NO: 60628 - DNA, 20 bp, Human herpesvirus
tcgttgcacccatcccccct

SEQ ID NO: 60629 - DNA, 20 bp, Human herpesvirus
cacccatcccccctttgctt

SEQ ID NO: 60630 - DNA, 20 bp, Human herpesvirus
gcttaatcacccgaaaacta

SEQ ID NO: 60631 - DNA, 20 bp, Human herpesvirus
cttaatcacccgaaaactag

SEQ ID NO: 60632 - DNA, 20 bp, Human herpesvirus
atttatagtggcgtatgcta

SEQ ID NO: 60633 - DNA, 20 bp, Human herpesvirus
tttatagtggcgtatgctaa

SEQ ID NO: 60634 - DNA, 20 bp, Human herpesvirus
atagtggcgtatgctaaccg

SEQ ID NO: 60635 - DNA, 20 bp, Human herpesvirus
tagtggcgtatgctaaccgc

SEQ ID NO: 60636 - DNA, 20 bp, Human herpesvirus
catgcgggataagttggcct

SEQ ID NO: 60637 - DNA, 20 bp, Human herpesvirus
ggcgtaggagcgtctttctc

SEQ ID NO: 60638 - DNA, 20 bp, Human herpesvirus
ctccaccgccgcgcatggtg

SEQ ID NO: 60639 - DNA, 20 bp, Human herpesvirus
tccaccgccgcgcatggtgt

SEQ ID NO: 60640 - DNA, 20 bp, Human herpesvirus
ttggatgctctgcgtgctgg

SEQ ID NO: 60641 - DNA, 20 bp, Human herpesvirus
gatgctctgcgtgctggagg

SEQ ID NO: 60642 - DNA, 20 bp, Human herpesvirus
ctggaactgaccgtgtggcg

SEQ ID NO: 60643 - DNA, 20 bp, Human herpesvirus
ctccgtgctccttcattgtc

SEQ ID NO: 60644 - DNA, 20 bp, Human herpesvirus
ccgacaatgaaggagcacgg

SEQ ID NO: 60645 - DNA, 20 bp, Human herpesvirus
acgtgcaggcgccacacggt

SEQ ID NO: 60646 - DNA, 20 bp, Human herpesvirus
cgtgcaggcgccacacggtc

SEQ ID NO: 60647 - DNA, 20 bp, Human herpesvirus
cctgctcttttgcgtgctgc

SEQ ID NO: 60648 - DNA, 20 bp, Human herpesvirus
tgcgtgctgctggaagcctg

SEQ ID NO: 60649 - DNA, 20 bp, Human herpesvirus
gcgtgctgctggaagcctgc

SEQ ID NO: 60650 - DNA, 20 bp, Human herpesvirus
cgtgctgctggaagcctgct

SEQ ID NO: 60651 - DNA, 20 bp, Human herpesvirus
cttaacctcggcctcggttg

SEQ ID NO: 60652 - DNA, 20 bp, Human herpesvirus
ttaaaaatccctttggggtc

SEQ ID NO: 60653 - DNA, 20 bp, Human herpesvirus
taaaaatccctttggggtcc

SEQ ID NO: 60654 - DNA, 20 bp, Human herpesvirus
aaaaatccctttggggtcct

SEQ ID NO: 60655 - DNA, 20 bp, Human herpesvirus
aaaatccctttggggtcctc

SEQ ID NO: 60656 - DNA, 20 bp, Human herpesvirus
ggggtcctcttgagtccctg

SEQ ID NO: 60657 - DNA, 20 bp, Human herpesvirus
tgttcggtctcccggattca

SEQ ID NO: 60658 - DNA, 20 bp, Human herpesvirus
ggtctcccggattcactgcc

SEQ ID NO: 60659 - DNA, 20 bp, Human herpesvirus
actgccatctctgaagggcc

SEQ ID NO: 60660 - DNA, 20 bp, Human herpesvirus
atcataggtggcatggccct

SEQ ID NO: 60661 - DNA, 20 bp, Human herpesvirus
agagatggcagtgaatccgg

SEQ ID NO: 60662 - DNA, 20 bp, Human herpesvirus
gagtgcaggtaaacgccaag

SEQ ID NO: 60663 - DNA, 20 bp, Human herpesvirus
gcctacgcacaagtggcttc

SEQ ID NO: 60664 - DNA, 20 bp, Human herpesvirus
ttaacgcgtaggggtgcggt

SEQ ID NO: 60665 - DNA, 20 bp, Human herpesvirus
agaagccacttgtgcgtagg

SEQ ID NO: 60666 - DNA, 20 bp, Human herpesvirus
tgcgtaggcgaagagaccgc

SEQ ID NO: 60667 - DNA, 20 bp, Human herpesvirus
tgtcagttccacggcgtgtt

SEQ ID NO: 60668 - DNA, 20 bp, Human herpesvirus
cacggcgtgttttgcctgta

SEQ ID NO: 60669 - DNA, 20 bp, Human herpesvirus
tgcctgtaccagtgtcgcca

SEQ ID NO: 60670 - DNA, 20 bp, Human herpesvirus
gcctgtaccagtgtcgccag

SEQ ID NO: 60671 - DNA, 20 bp, Human herpesvirus
cctgtaccagtgtcgccagt

SEQ ID NO: 60672 - DNA, 20 bp, Human herpesvirus
cgtaccagagtcccgagctc

SEQ ID NO: 60673 - DNA, 20 bp, Human herpesvirus
gcgcttcagtgcaccgtggg

SEQ ID NO: 60674 - DNA, 20 bp, Human herpesvirus
agtgcaccgtgggccctgac

SEQ ID NO: 60675 - DNA, 20 bp, Human herpesvirus
caggagaggtatttcccact

SEQ ID NO: 60676 - DNA, 20 bp, Human herpesvirus
cccactgggcggagttacat

SEQ ID NO: 60677 - DNA, 20 bp, Human herpesvirus
ccactgggcggagttacatg

SEQ ID NO: 60678 - DNA, 20 bp, Human herpesvirus
catgttatcagtgactggat

SEQ ID NO: 60679 - DNA, 20 bp, Human herpesvirus
tcagtgactggatgtgggca

SEQ ID NO: 60680 - DNA, 20 bp, Human herpesvirus
ctgaacacgcccgtgacctg

SEQ ID NO: 60681 - DNA, 20 bp, Human herpesvirus
gcgctgcgactgcagaatca

SEQ ID NO: 60682 - DNA, 20 bp, Human herpesvirus
acgatcgtctgattctgcag

SEQ ID NO: 60683 - DNA, 20 bp, Human herpesvirus
tgcagtcgcagcgccaactc

SEQ ID NO: 60684 - DNA, 20 bp, Human herpesvirus
agtaatagacgggacgcatt

SEQ ID NO: 60685 - DNA, 20 bp, Human herpesvirus
cgcaacatggtaaggcgacg

SEQ ID NO: 60686 - DNA, 20 bp, Human herpesvirus
ccatgttgcgcaattcaggc

SEQ ID NO: 60687 - DNA, 20 bp, Human herpesvirus
cgcaattcaggcatcggcag

SEQ ID NO: 60688 - DNA, 20 bp, Human herpesvirus
aggcatcggcagcctctacc

SEQ ID NO: 60689 - DNA, 20 bp, Human herpesvirus
ttctttgcggtccactctat

SEQ ID NO: 60690 - DNA, 20 bp, Human herpesvirus
ttaggatatccctaacttcg

SEQ ID NO: 60691 - DNA, 20 bp, Human herpesvirus
ggatatccctaacttcggag

SEQ ID NO: 60692 - DNA, 20 bp, Human herpesvirus
ggagcggagacggccggacg

SEQ ID NO: 60693 - DNA, 20 bp, Human herpesvirus
tgtgggagcgtccggccgtc

SEQ ID NO: 60694 - DNA, 20 bp, Human herpesvirus
gtgggagcgtccggccgtct

SEQ ID NO: 60695 - DNA, 20 bp, Human herpesvirus
ctcaaggggccgtgattact

SEQ ID NO: 60696 - DNA, 20 bp, Human herpesvirus
ctgcgacaacggtgccgcag

SEQ ID NO: 60697 - DNA, 20 bp, Human herpesvirus
caggcaactcccctccggta

SEQ ID NO: 60698 - DNA, 20 bp, Human herpesvirus
cctgcggcaccgttgtcgca

SEQ ID NO: 60699 - DNA, 20 bp, Human herpesvirus
tcgcagtaatcacggcccct

SEQ ID NO: 60700 - DNA, 20 bp, Human herpesvirus
ctcccggcgctcgcccaacc

SEQ ID NO: 60701 - DNA, 20 bp, Human herpesvirus
cgggcggtcatgacggagac

SEQ ID NO: 60702 - DNA, 20 bp, Human herpesvirus
gtctccgtcatgaccgcccg

SEQ ID NO: 60703 - DNA, 20 bp, Human herpesvirus
gcccgaggcttctggttggg

SEQ ID NO: 60704 - DNA, 20 bp, Human herpesvirus
tggttgggcgagcgccggga

SEQ ID NO: 60705 - DNA, 20 bp, Human herpesvirus
ggtgcagcgcgacactgtcc

SEQ ID NO: 60706 - DNA, 20 bp, Human herpesvirus
ttctgccgtattgtaggcgg

SEQ ID NO: 60707 - DNA, 20 bp, Human herpesvirus
tgccgtattgtaggcggtcg

SEQ ID NO: 60708 - DNA, 20 bp, Human herpesvirus
taggcggtcgcgtggtctgc

SEQ ID NO: 60709 - DNA, 20 bp, Human herpesvirus
taacatgatggtttcgcata

SEQ ID NO: 60710 - DNA, 20 bp, Human herpesvirus
cgcatacccgggcgcggggg

SEQ ID NO: 60711 - DNA, 20 bp, Human herpesvirus
gcatacccgggcgcgggggc

SEQ ID NO: 60712 - DNA, 20 bp, Human herpesvirus
aggttcgaagggatacaccc

SEQ ID NO: 60713 - DNA, 20 bp, Human herpesvirus
gaagggatacacccgctcac

SEQ ID NO: 60714 - DNA, 20 bp, Human herpesvirus
gccgctttgggggagcaatc

SEQ ID NO: 60715 - DNA, 20 bp, Human herpesvirus
gggggagcaatccctgtggc

SEQ ID NO: 60716 - DNA, 20 bp, Human herpesvirus
ggggagcaatccctgtggcg

SEQ ID NO: 60717 - DNA, 20 bp, Human herpesvirus
ccgcttgggcgtgcggcgga

SEQ ID NO: 60718 - DNA, 20 bp, Human herpesvirus
gtcggtgagttcagccaggg

SEQ ID NO: 60719 - DNA, 20 bp, Human herpesvirus
gcggatgcactttctccggg

SEQ ID NO: 60720 - DNA, 20 bp, Human herpesvirus
ctccgggagaccagacgcgc

SEQ ID NO: 60721 - DNA, 20 bp, Human herpesvirus
tccgggagaccagacgcgcc

SEQ ID NO: 60722 - DNA, 20 bp, Human herpesvirus
tccatggggagatcttcctg

SEQ ID NO: 60723 - DNA, 20 bp, Human herpesvirus
ccatggggagatcttcctgt

SEQ ID NO: 60724 - DNA, 20 bp, Human herpesvirus
tcgcgtcccagaggacccca

SEQ ID NO: 60725 - DNA, 20 bp, Human herpesvirus
actggtatccacacggagca

SEQ ID NO: 60726 - DNA, 20 bp, Human herpesvirus
tgttcagtcgttatatcgcc

SEQ ID NO: 60727 - DNA, 20 bp, Human herpesvirus
tccccctctcacaccagttg

SEQ ID NO: 60728 - DNA, 20 bp, Human herpesvirus
gtccctttgggccgctggag

SEQ ID NO: 60729 - DNA, 20 bp, Human herpesvirus
gggccgctggaggacgcctc

SEQ ID NO: 60730 - DNA, 20 bp, Human herpesvirus
ggccgctggaggacgcctct

SEQ ID NO: 60731 - DNA, 20 bp, Human herpesvirus
cgcggtgatgtgtgggggct

SEQ ID NO: 60732 - DNA, 20 bp, Human herpesvirus
atttccgccacgtcccgtct

SEQ ID NO: 60733 - DNA, 20 bp, Human herpesvirus
ccgccacgtcccgtctttcc

SEQ ID NO: 60734 - DNA, 20 bp, Human herpesvirus
cgccacgtcccgtctttccg

SEQ ID NO: 60735 - DNA, 20 bp, Human herpesvirus
aaggagcccacgttctcccg

SEQ ID NO: 60736 - DNA, 20 bp, Human herpesvirus
tcccgccacattataagcaa

SEQ ID NO: 60737 - DNA, 20 bp, Human herpesvirus
cttataatgtggcgggagaa

SEQ ID NO: 60738 - DNA, 20 bp, Human herpesvirus
taatgtggcgggagaacgtg

SEQ ID NO: 60739 - DNA, 20 bp, Human herpesvirus
aaccggccctgttggacgat

SEQ ID NO: 60740 - DNA, 20 bp, Human herpesvirus
tatcacccccagcacatcgc

SEQ ID NO: 60741 - DNA, 20 bp, Human herpesvirus
ggctccgttacctgcggtgc

SEQ ID NO: 60742 - DNA, 20 bp, Human herpesvirus
cctgcggtgctggcagatgc

SEQ ID NO: 60743 - DNA, 20 bp, Human herpesvirus
gcccaccacagacacctccc

SEQ ID NO: 60744 - DNA, 20 bp, Human herpesvirus
tctgcgggggggcttgtgtc

SEQ ID NO: 60745 - DNA, 20 bp, Human herpesvirus
ctgcgggggggcttgtgtct

SEQ ID NO: 60746 - DNA, 20 bp, Human herpesvirus
tgcgggggggcttgtgtctc

SEQ ID NO: 60747 - DNA, 20 bp, Human herpesvirus
tgtctctcgcgtgaggtgag

SEQ ID NO: 60748 - DNA, 20 bp, Human herpesvirus
aacgctcgaatcacgccgtg

SEQ ID NO: 60749 - DNA, 20 bp, Human herpesvirus
ccccaaggcgcaccgtagcc

SEQ ID NO: 60750 - DNA, 20 bp, Human herpesvirus
atctccggcgggatcctgat

SEQ ID NO: 60751 - DNA, 20 bp, Human herpesvirus
tctccggcgggatcctgatt

SEQ ID NO: 60752 - DNA, 20 bp, Human herpesvirus
cgcgggctacggtgcgcctt

SEQ ID NO: 60753 - DNA, 20 bp, Human herpesvirus
cgcacgagaccaggtccctc

SEQ ID NO: 60754 - DNA, 20 bp, Human herpesvirus
ataaggctcaaaaaacacag

SEQ ID NO: 60755 - DNA, 20 bp, Human herpesvirus
tttgagccttattaagtccc

SEQ ID NO: 60756 - DNA, 20 bp, Human herpesvirus
ttgagccttattaagtcccg

SEQ ID NO: 60757 - DNA, 20 bp, Human herpesvirus
tgagccttattaagtcccgc

SEQ ID NO: 60758 - DNA, 20 bp, Human herpesvirus
cgcctgcccagggagcagga

SEQ ID NO: 60759 - DNA, 20 bp, Human herpesvirus
gcatcgaggagctgtccggc

SEQ ID NO: 60760 - DNA, 20 bp, Human herpesvirus
ttatactcctgctccctggg

SEQ ID NO: 60761 - DNA, 20 bp, Human herpesvirus
tatactcctgctccctgggc

SEQ ID NO: 60762 - DNA, 20 bp, Human herpesvirus
atactcctgctccctgggca

SEQ ID NO: 60763 - DNA, 20 bp, Human herpesvirus
gggaggaagacgtggttacg

SEQ ID NO: 60764 - DNA, 20 bp, Human herpesvirus
cggggggtaagagtgccggt

SEQ ID NO: 60765 - DNA, 20 bp, Human herpesvirus
cgggagcgggtgaaggaatg

SEQ ID NO: 60766 - DNA, 20 bp, Human herpesvirus
cttcacccgctcccgcaaca

SEQ ID NO: 60767 - DNA, 20 bp, Human herpesvirus
acccgctcccgcaacacctt

SEQ ID NO: 60768 - DNA, 20 bp, Human herpesvirus
cagagacccctggggcactg

SEQ ID NO: 60769 - DNA, 20 bp, Human herpesvirus
agagacccctggggcactgg

SEQ ID NO: 60770 - DNA, 20 bp, Human herpesvirus
aggtgccccaggtacacttg

SEQ ID NO: 60771 - DNA, 20 bp, Human herpesvirus
tcagaggtgctgcgggcggc

SEQ ID NO: 60772 - DNA, 20 bp, Human herpesvirus
ccttcgacctttacgtccgg

SEQ ID NO: 60773 - DNA, 20 bp, Human herpesvirus
gacctttacgtccggggtga

SEQ ID NO: 60774 - DNA, 20 bp, Human herpesvirus
acgtccggggtgaccctgta

SEQ ID NO: 60775 - DNA, 20 bp, Human herpesvirus
cgtccggggtgaccctgtat

SEQ ID NO: 60776 - DNA, 20 bp, Human herpesvirus
acctcggcccagctggtaaa

SEQ ID NO: 60777 - DNA, 20 bp, Human herpesvirus
cttgcaggcgaagaggcact

SEQ ID NO: 60778 - DNA, 20 bp, Human herpesvirus
caggcgaagaggcactcctg

SEQ ID NO: 60779 - DNA, 20 bp, Human herpesvirus
gtggtcctccggactccacg

SEQ ID NO: 60780 - DNA, 20 bp, Human herpesvirus
gcctgcaaggaattctgccg

SEQ ID NO: 60781 - DNA, 20 bp, Human herpesvirus
tgccgggagctgggagtggc

SEQ ID NO: 60782 - DNA, 20 bp, Human herpesvirus
cagactaccacctggtgctg

SEQ ID NO: 60783 - DNA, 20 bp, Human herpesvirus
agactaccacctggtgctgc

SEQ ID NO: 60784 - DNA, 20 bp, Human herpesvirus
gcaagccgctgaaccagctt

SEQ ID NO: 60785 - DNA, 20 bp, Human herpesvirus
agggtctccaagatgcgcac

SEQ ID NO: 60786 - DNA, 20 bp, Human herpesvirus
tcggagctgtcgcgatagag

SEQ ID NO: 60787 - DNA, 20 bp, Human herpesvirus
gagaccctgaagctggttca

SEQ ID NO: 60788 - DNA, 20 bp, Human papillomavirus
ttgctttgcaaagagtatgg

SEQ ID NO: 60789 - DNA, 20 bp, Human papillomavirus
tgctttgcaaagagtatggt

SEQ ID NO: 60790 - DNA, 20 bp, Human papillomavirus
gctttgcaaagagtatggtt

SEQ ID NO: 60791 - DNA, 20 bp, Human papillomavirus
ctttgcaaagagtatggttt

SEQ ID NO: 60792 - DNA, 20 bp, Human papillomavirus
gcaaagagtatggtttggag

SEQ ID NO: 60793 - DNA, 20 bp, Human papillomavirus
agtgcggacaagcagaccta

SEQ ID NO: 60794 - DNA, 20 bp, Human papillomavirus
ttgaagacgctgactctagt

SEQ ID NO: 60795 - DNA, 20 bp, Human papillomavirus
aagacgctgactctagtgtg

SEQ ID NO: 60796 - DNA, 20 bp, Human papillomavirus
tggaggattccgaaggtacc

SEQ ID NO: 60797 - DNA, 20 bp, Human papillomavirus
ggaatcctccataacgctag

SEQ ID NO: 60798 - DNA, 20 bp, Human papillomavirus
ttggaacgccagaggaggta

SEQ ID NO: 60799 - DNA, 20 bp, Human papillomavirus
gaacgccagaggaggtaacg

SEQ ID NO: 60800 - DNA, 20 bp, Human papillomavirus
gatctgcctctccgtctccc

SEQ ID NO: 60801 - DNA, 20 bp, Human papillomavirus
acgctcctcctcctgatcct

SEQ ID NO: 60802 - DNA, 20 bp, Human papillomavirus
gctttcctcatcccccgtta

SEQ ID NO: 60803 - DNA, 20 bp, Human papillomavirus
tactggtacaagacggccat

SEQ ID NO: 60804 - DNA, 20 bp, Human papillomavirus
ttagacagacgttggtagga

SEQ ID NO: 60805 - DNA, 20 bp, Human papillomavirus
gacagacgttggtaggacat

SEQ ID NO: 60806 - DNA, 20 bp, Human papillomavirus
gtaggacatagcatggaaga

SEQ ID NO: 60807 - DNA, 20 bp, Human papillomavirus
gtcttccatgctatgtccta

SEQ ID NO: 60808 - DNA, 20 bp, Human papillomavirus
gtgtcgttcctagctgcctt

SEQ ID NO: 60809 - DNA, 20 bp, Human papillomavirus
tgtcgttcctagctgccttt

SEQ ID NO: 60810 - DNA, 20 bp, Human papillomavirus
ctagctgcctttaaattgtt

SEQ ID NO: 60811 - DNA, 20 bp, Human papillomavirus
aaattgttcctaaaaggcgt

SEQ ID NO: 60812 - DNA, 20 bp, Human papillomavirus
aattgttcctaaaaggcgtg

SEQ ID NO: 60813 - DNA, 20 bp, Human papillomavirus
gctgcagcttaagtgtccac

SEQ ID NO: 60814 - DNA, 20 bp, Human papillomavirus
ctgcagcttaagtgtccacc

SEQ ID NO: 60815 - DNA, 20 bp, Human papillomavirus
agtgtccacccctaatgata

SEQ ID NO: 60816 - DNA, 20 bp, Human papillomavirus
gcgcagcaggctgacagtgt

SEQ ID NO: 60817 - DNA, 20 bp, Human papillomavirus
cgcagcaggctgacagtgtt

SEQ ID NO: 60818 - DNA, 20 bp, Human papillomavirus
cagacattgatgcagagtgc

SEQ ID NO: 60819 - DNA, 20 bp, Human papillomavirus
gcttttgacacggtgagggc

SEQ ID NO: 60820 - DNA, 20 bp, Human papillomavirus
tgacacggtgagggcaggca

SEQ ID NO: 60821 - DNA, 20 bp, Human papillomavirus
gacacggtgagggcaggcac

SEQ ID NO: 60822 - DNA, 20 bp, Human papillomavirus
acacggtgagggcaggcaca

SEQ ID NO: 60823 - DNA, 20 bp, Human papillomavirus
gaactgctgtatccccagtc

SEQ ID NO: 60824 - DNA, 20 bp, Human papillomavirus
ctgctcctgttgattctgct

SEQ ID NO: 60825 - DNA, 20 bp, Human papillomavirus
attctgctgaggctgcgact

SEQ ID NO: 60826 - DNA, 20 bp, Human papillomavirus
tgctgaggctgcgactgggg

SEQ ID NO: 60827 - DNA, 20 bp, Human papillomavirus
taataggggatagtggttcg

SEQ ID NO: 60828 - DNA, 20 bp, Human papillomavirus
aacagcgtacagagttcctg

SEQ ID NO: 60829 - DNA, 20 bp, Human papillomavirus
ctgacaagagtcagtatacc

SEQ ID NO: 60830 - DNA, 20 bp, Human papillomavirus
atagcattgccagggtatat

SEQ ID NO: 60831 - DNA, 20 bp, Human papillomavirus
ccagggtatatgtctgcatt

SEQ ID NO: 60832 - DNA, 20 bp, Human papillomavirus
gtataatcctacatgcttgt

SEQ ID NO: 60833 - DNA, 20 bp, Human papillomavirus
aatgtctgttggtgattctt

SEQ ID NO: 60834 - DNA, 20 bp, Human papillomavirus
gtgattcttatcctaatcgc

SEQ ID NO: 60835 - DNA, 20 bp, Human papillomavirus
ttatcctaatcgccttttta

SEQ ID NO: 60836 - DNA, 20 bp, Human papillomavirus
tcctaatcgcctttttattg

SEQ ID NO: 60837 - DNA, 20 bp, Human papillomavirus
ttattgttgatgttttatgt

SEQ ID NO: 60838 - DNA, 20 bp, Human papillomavirus
actggtactggtggcttcga

SEQ ID NO: 60839 - DNA, 20 bp, Human papillomavirus
ctggtactggtggcttcgaa

SEQ ID NO: 60840 - DNA, 20 bp, Human papillomavirus
gaagtgacaacctccaccgt

SEQ ID NO: 60841 - DNA, 20 bp, Human papillomavirus
cagaccccgccgtcttggat

SEQ ID NO: 60842 - DNA, 20 bp, Human papillomavirus
gatatcaccccctcaggtac

SEQ ID NO: 60843 - DNA, 20 bp, Human papillomavirus
tatgatgtttatgctgattc

SEQ ID NO: 60844 - DNA, 20 bp, Human papillomavirus
atgctgattcggatgtcctt

SEQ ID NO: 60845 - DNA, 20 bp, Human papillomavirus
tgctgattcggatgtccttc

SEQ ID NO: 60846 - DNA, 20 bp, Human papillomavirus
ggatgtccttcagccattgc

SEQ ID NO: 60847 - DNA, 20 bp, Human papillomavirus
agccattgcttgatgagtta

SEQ ID NO: 60848 - DNA, 20 bp, Human papillomavirus
caaaggtgatcagtacggat

SEQ ID NO: 60849 - DNA, 20 bp, Human papillomavirus
aaaggtgatcagtacggatg

SEQ ID NO: 60850 - DNA, 20 bp, Human papillomavirus
gtccgcgtgacatagacatc

SEQ ID NO: 60851 - DNA, 20 bp, Human papillomavirus
gaaacaggtgttggaggtag

SEQ ID NO: 60852 - DNA, 20 bp, Human papillomavirus
aaacaggtgttggaggtagg

SEQ ID NO: 60853 - DNA, 20 bp, Human papillomavirus
aaacagggttcggtgccttg

SEQ ID NO: 60854 - DNA, 20 bp, Human papillomavirus
ggtgccttggattttgccac

SEQ ID NO: 60855 - DNA, 20 bp, Human papillomavirus
gattttgccactctgcagtc

SEQ ID NO: 60856 - DNA, 20 bp, Human papillomavirus
tgccactctgcagtcaaata

SEQ ID NO: 60857 - DNA, 20 bp, Human papillomavirus
gccactctgcagtcaaataa

SEQ ID NO: 60858 - DNA, 20 bp, Human papillomavirus
gcagttcatcttccaactgt

SEQ ID NO: 60859 - DNA, 20 bp, Human papillomavirus
cagttcatcttccaactgtg

SEQ ID NO: 60860 - DNA, 20 bp, Human papillomavirus
atcttccaactgtgcaagat

SEQ ID NO: 60861 - DNA, 20 bp, Human papillomavirus
caactgtgcaagataaccct

SEQ ID NO: 60862 - DNA, 20 bp, Human papillomavirus
ctcctgaaattatggcctat

SEQ ID NO: 60863 - DNA, 20 bp, Human papillomavirus
tgtgttctgtaactgtacgt

SEQ ID NO: 60864 - DNA, 20 bp, Human papillomavirus
tgtaactgtacgttctggtg

SEQ ID NO: 60865 - DNA, 20 bp, Human papillomavirus
tggtgcacagatttctgcac

SEQ ID NO: 60866 - DNA, 20 bp, Human papillomavirus
ctgcaccccatcgccttgtg

SEQ ID NO: 60867 - DNA, 20 bp, Human papillomavirus
tgcaccccatcgccttgtgt

SEQ ID NO: 60868 - DNA, 20 bp, Human papillomavirus type 134
cctggaactgcttaatgagc

SEQ ID NO: 60869 - DNA, 20 bp, Human papillomavirus type 134
atgagcagctgctgcaagaa

SEQ ID NO: 60870 - DNA, 20 bp, Human papillomavirus type 134
aattggcagatctaaaacga

SEQ ID NO: 60871 - DNA, 20 bp, Human papillomavirus type 134
gcagatctaaaacgaaagta

SEQ ID NO: 60872 - DNA, 20 bp, Human papillomavirus type 134
ctctggactcaaatactttc

SEQ ID NO: 60873 - DNA, 20 bp, Human papillomavirus type 134
tattggggttacacaggtag

SEQ ID NO: 60874 - DNA, 20 bp, Human papillomavirus type 134
gggttacacaggtagagtct

SEQ ID NO: 60875 - DNA, 20 bp, Human papillomavirus type 134
cacaggtagagtctgtctct

SEQ ID NO: 60876 - DNA, 20 bp, Human papillomavirus type 134
ccagacagtagacgatggcg

SEQ ID NO: 60877 - DNA, 20 bp, Human papillomavirus type 134
ttgcaaagtaaaaatagacg

SEQ ID NO: 60878 - DNA, 20 bp, Human papillomavirus type 134
tggttacagcctttaacaga

SEQ ID NO: 60879 - DNA, 20 bp, Human papillomavirus type 134
ggttacagcctttaacagac

SEQ ID NO: 60880 - DNA, 20 bp, Human papillomavirus type 134
gttacagcctttaacagaca

SEQ ID NO: 60881 - DNA, 20 bp, Human papillomavirus type 134
cagcctttaacagacagtaa

SEQ ID NO: 60882 - DNA, 20 bp, Human papillomavirus type 134
aacagacagtaaatttgggc

SEQ ID NO: 60883 - DNA, 20 bp, Human papillomavirus type 134
tattatgcaaggcagaaagg

SEQ ID NO: 60884 - DNA, 20 bp, Human papillomavirus type 134
tgcaaggcagaaaggaatat

SEQ ID NO: 60885 - DNA, 20 bp, Human papillomavirus type 134
catctttagctgtaagtgaa

SEQ ID NO: 60886 - DNA, 20 bp, Human papillomavirus type 134
agctgtaagtgaatttaaag

SEQ ID NO: 60887 - DNA, 20 bp, Human papillomavirus type 134
gctgtaagtgaatttaaagc

SEQ ID NO: 60888 - DNA, 20 bp, Human papillomavirus type 134
gttgcacaaaccggagaaac

SEQ ID NO: 60889 - DNA, 20 bp, Human papillomavirus type 134
cacaaaccggagaaacctcc

SEQ ID NO: 60890 - DNA, 20 bp, Human papillomavirus type 134
cctctgggtgttgatgagga

SEQ ID NO: 60891 - DNA, 20 bp, Human papillomavirus type 134
atgaggatgtccttcgactt

SEQ ID NO: 60892 - DNA, 20 bp, Human papillomavirus type 134
gacttccccctcgtcgcccc

SEQ ID NO: 60893 - DNA, 20 bp, Human papillomavirus type 134
ctgatcgtttgttgaagata

SEQ ID NO: 60894 - DNA, 20 bp, Human papillomavirus type 134
gttgaagatattcagtagtt

SEQ ID NO: 60895 - DNA, 20 bp, Human papillomavirus type 134
ttgaagatattcagtagttt

SEQ ID NO: 60896 - DNA, 20 bp, Human papillomavirus type 134
aagatattcagtagtttagt

SEQ ID NO: 60897 - DNA, 20 bp, Human papillomavirus type 134
agtagtttagtatactttgg

SEQ ID NO: 60898 - DNA, 20 bp, Human papillomavirus type 134
gacataactacagaaccaga

SEQ ID NO: 60899 - DNA, 20 bp, Human papillomavirus type 134
acataactacagaaccagac

SEQ ID NO: 60900 - DNA, 20 bp, Human papillomavirus type 134
tagacactgcaggagtatta

SEQ ID NO: 60901 - DNA, 20 bp, Human papillomavirus type 134
ctaccactacttatttctat

SEQ ID NO: 60902 - DNA, 20 bp, Human papillomavirus type 134
tttctattatgtctggttct

SEQ ID NO: 60903 - DNA, 20 bp, Human papillomavirus type 134
gaacaggatttaaatcagat

SEQ ID NO: 60904 - DNA, 20 bp, Human papillomavirus type 134
aacaggatttaaatcagata

SEQ ID NO: 60905 - DNA, 20 bp, Human papillomavirus type 134
aaatcagatagcaactgctg

SEQ ID NO: 60906 - DNA, 20 bp, Human papillomavirus type 134
aatcagatagcaactgctgc

SEQ ID NO: 60907 - DNA, 20 bp, Human papillomavirus type 134
tgctgacataataaaactag

SEQ ID NO: 60908 - DNA, 20 bp, Human papillomavirus type 134
tggtgaaggactctttgtgt

SEQ ID NO: 60909 - DNA, 20 bp, Human papillomavirus type 134
gtgtctcaccctcagggacg

SEQ ID NO: 60910 - DNA, 20 bp, Human papillomavirus type 134
tgtctcaccctcagggacga

SEQ ID NO: 60911 - DNA, 20 bp, Human papillomavirus type 134
ccagcaataataacaccagg

SEQ ID NO: 60912 - DNA, 20 bp, Human papillomavirus type 134
atatgctaggtctgcctgca

SEQ ID NO: 60913 - DNA, 20 bp, Human papillomavirus type 134
tgtgcaagaaacagaaatat

SEQ ID NO: 60914 - DNA, 20 bp, Human papillomavirus type 134
cacggcagtagtgatcgcct

SEQ ID NO: 60915 - DNA, 20 bp, Human papillomavirus type 134
taacagttggacatccatat

SEQ ID NO: 60916 - DNA, 20 bp, Human papillomavirus type 134
gacatccatattttccaata

SEQ ID NO: 60917 - DNA, 20 bp, Human papillomavirus type 134
ttggaaaatatggatgtcca

SEQ ID NO: 60918 - DNA, 20 bp, Human papillomavirus type 134
aggaattggaacaacaggtc

SEQ ID NO: 60919 - DNA, 20 bp, Human papillomavirus type 134
ggaattggaacaacaggtca

SEQ ID NO: 60920 - DNA, 20 bp, Human papillomavirus type 134
gaacaacaggtcaccccttg

SEQ ID NO: 60921 - DNA, 20 bp, Human papillomavirus type 134
ctaaataagttaaacgatac

SEQ ID NO: 60922 - DNA, 20 bp, Human papillomavirus type 134
aacgatacagagaatccaaa

SEQ ID NO: 60923 - DNA, 20 bp, Human papillomavirus type 134
gttaattcttacattgagga

SEQ ID NO: 60924 - DNA, 20 bp, Human papillomavirus type 134
attcttacattgaggatgga

SEQ ID NO: 60925 - DNA, 20 bp, Human papillomavirus type 134
ttacattgaggatggagaca

SEQ ID NO: 60926 - DNA, 20 bp, Human papillomavirus type 134
cattgaggatggagacatgt

SEQ ID NO: 60927 - DNA, 20 bp, Human papillomavirus type 134
aggatggagacatgtgtgat

SEQ ID NO: 60928 - DNA, 20 bp, Human papillomavirus type 134
atatgtgttacctggtcaag

SEQ ID NO: 60929 - DNA, 20 bp, Human papillomavirus type 134
tatgtgttacctggtcaagg

SEQ ID NO: 60930 - DNA, 20 bp, Human papillomavirus type 134
cctggtcaaggtactcaggc

SEQ ID NO: 60931 - DNA, 20 bp, Human papillomavirus type 134
cttcatcagtttactttcct

SEQ ID NO: 60932 - DNA, 20 bp, Human papillomavirus type 134
ttcatcagtttactttccta

SEQ ID NO: 60933 - DNA, 20 bp, Human papillomavirus type 134
gctaagtataacttttggga

SEQ ID NO: 60934 - DNA, 20 bp, Human papillomavirus type 134
ctaagtataacttttgggat

SEQ ID NO: 60935 - DNA, 20 bp, Human papillomavirus type 134
tgggatgtggatctatcaga

SEQ ID NO: 60936 - DNA, 20 bp, Human papillomavirus type 134
gggatgtggatctatcagac

SEQ ID NO: 60937 - DNA, 20 bp, Human papillomavirus type 134
ggatgtggatctatcagaca

SEQ ID NO: 60938 - DNA, 20 bp, Human papillomavirus type 134
taaactgtgaataataaatg

SEQ ID NO: 60939 - DNA, 20 bp, Human papillomavirus type 134
aaactgtgaataataaatgg

SEQ ID NO: 60940 - DNA, 20 bp, Human papillomavirus type 134
aactgtgaataataaatggt

SEQ ID NO: 60941 - DNA, 20 bp, Human papillomavirus type 134
tgtgttactgactcacaggg

SEQ ID NO: 60942 - DNA, 20 bp, Human papillomavirus type 134
ctgactcacagggtctttgg

SEQ ID NO: 60943 - DNA, 20 bp, Human papillomavirus type 137
ttattactgtttacgtgttt

SEQ ID NO: 60944 - DNA, 20 bp, Human papillomavirus type 137
ttactgtttacgtgttttaa

SEQ ID NO: 60945 - DNA, 20 bp, Human papillomavirus type 137
ctgtttacgtgttttaacat

SEQ ID NO: 60946 - DNA, 20 bp, Human papillomavirus type 137
acgtgttttaacattggtgg

SEQ ID NO: 60947 - DNA, 20 bp, Human papillomavirus type 137
cgtgttttaacattggtgga

SEQ ID NO: 60948 - DNA, 20 bp, Human papillomavirus type 137
ggaggaattatttgacgaaa

SEQ ID NO: 60949 - DNA, 20 bp, Human papillomavirus type 137
gaggaattatttgacgaaag

SEQ ID NO: 60950 - DNA, 20 bp, Human papillomavirus type 137
tttgacgaaagtactgatgg

SEQ ID NO: 60951 - DNA, 20 bp, Human papillomavirus type 137
gacgaaagtactgatgggtc

SEQ ID NO: 60952 - DNA, 20 bp, Human papillomavirus type 137
acgaaagtactgatgggtcc

SEQ ID NO: 60953 - DNA, 20 bp, Human papillomavirus type 137
caggacagtggcatagcaga

SEQ ID NO: 60954 - DNA, 20 bp, Human papillomavirus type 137
aggacagtggcatagcagaa

SEQ ID NO: 60955 - DNA, 20 bp, Human papillomavirus type 137
ttctgaacaggtagaaacta

SEQ ID NO: 60956 - DNA, 20 bp, Human papillomavirus type 137
tgaacaggtagaaactatag

SEQ ID NO: 60957 - DNA, 20 bp, Human papillomavirus type 137
tgaaaatggcgcagatgatg

SEQ ID NO: 60958 - DNA, 20 bp, Human papillomavirus type 137
ccagattgggttactaaaca

SEQ ID NO: 60959 - DNA, 20 bp, Human papillomavirus type 137
ggttactaaacaaacaatgg

SEQ ID NO: 60960 - DNA, 20 bp, Human papillomavirus type 137
ctaaacaaacaatggtgaat

SEQ ID NO: 60961 - DNA, 20 bp, Human papillomavirus type 137
gatctatcacaaatggtaca

SEQ ID NO: 60962 - DNA, 20 bp, Human papillomavirus type 137
atctatcacaaatggtacaa

SEQ ID NO: 60963 - DNA, 20 bp, Human papillomavirus type 137
caactgctgcagaagttgga

SEQ ID NO: 60964 - DNA, 20 bp, Human papillomavirus type 137
gaagcaatcatagaacagtt

SEQ ID NO: 60965 - DNA, 20 bp, Human papillomavirus type 137
aaggaactgttctatgattg

SEQ ID NO: 60966 - DNA, 20 bp, Human papillomavirus type 137
tatgattgcttccaacttct

SEQ ID NO: 60967 - DNA, 20 bp, Human papillomavirus type 137
cttccaacttctgcagcagt

SEQ ID NO: 60968 - DNA, 20 bp, Human papillomavirus type 137
tagtagcatttgacagcgat

SEQ ID NO: 60969 - DNA, 20 bp, Human papillomavirus type 137
agtagcatttgacagcgata

SEQ ID NO: 60970 - DNA, 20 bp, Human papillomavirus type 137
gtagcatttgacagcgataa

SEQ ID NO: 60971 - DNA, 20 bp, Human papillomavirus type 137
gacagcgataaacaaagaga

SEQ ID NO: 60972 - DNA, 20 bp, Human papillomavirus type 137
acagcgataaacaaagagat

SEQ ID NO: 60973 - DNA, 20 bp, Human papillomavirus type 137
ttactaaaagtgtttggaag

SEQ ID NO: 60974 - DNA, 20 bp, Human papillomavirus type 137
tactaaaagtgtttggaagt

SEQ ID NO: 60975 - DNA, 20 bp, Human papillomavirus type 137
actaaaagtgtttggaagtg

SEQ ID NO: 60976 - DNA, 20 bp, Human papillomavirus type 137
ctaaaagtgtttggaagtgt

SEQ ID NO: 60977 - DNA, 20 bp, Human papillomavirus type 137
ggaagtgtggtctattttgg

SEQ ID NO: 60978 - DNA, 20 bp, Human papillomavirus type 137
ccctgggttagcagcagata

SEQ ID NO: 60979 - DNA, 20 bp, Human papillomavirus type 137
cctgggttagcagcagataa

SEQ ID NO: 60980 - DNA, 20 bp, Human papillomavirus type 137
gcagcagataatgaaaatat

SEQ ID NO: 60981 - DNA, 20 bp, Human papillomavirus type 137
gtgaacacccaaatattatt

SEQ ID NO: 60982 - DNA, 20 bp, Human papillomavirus type 137
gggtgttcaccaacccctgt

SEQ ID NO: 60983 - DNA, 20 bp, Human papillomavirus type 137
ccatgtagatgcaaatctga

SEQ ID NO: 60984 - DNA, 20 bp, Human papillomavirus type 137
gtagatgcacagtcttttgg

SEQ ID NO: 60985 - DNA, 20 bp, Human papillomavirus type 137
tagatgcacagtcttttggt

SEQ ID NO: 60986 - DNA, 20 bp, Human papillomavirus type 137
tggtactcatgtgggttata

SEQ ID NO: 60987 - DNA, 20 bp, Human papillomavirus type 137
ggtactcatgtgggttatac

SEQ ID NO: 60988 - DNA, 20 bp, Human papillomavirus type 137
gaatttgaaaatcccgcctt

SEQ ID NO: 60989 - DNA, 20 bp, Human papillomavirus type 137
aatttgaaaatcccgccttt

SEQ ID NO: 60990 - DNA, 20 bp, Human papillomavirus type 137
gaaaatcccgcctttgagga

SEQ ID NO: 60991 - DNA, 20 bp, Human papillomavirus type 137
aaaatcccgcctttgaggag

SEQ ID NO: 60992 - DNA, 20 bp, Human papillomavirus type 137
gaggaggacgtcactatgga

SEQ ID NO: 60993 - DNA, 20 bp, Human papillomavirus type 137
tggtgccagatacaccttat

SEQ ID NO: 60994 - DNA, 20 bp, Human papillomavirus type 137
tattcctgtgcaacctcctg

SEQ ID NO: 60995 - DNA, 20 bp, Human papillomavirus type 137
ctgtgcaacctcctgatgga

SEQ ID NO: 60996 - DNA, 20 bp, Human papillomavirus type 137
tggtagatgacaatgattat

SEQ ID NO: 60997 - DNA, 20 bp, Human papillomavirus type 137
tcatctaccagaactccatc

SEQ ID NO: 60998 - DNA, 20 bp, Human papillomavirus type 137
cattcgagtactgaccgcct

SEQ ID NO: 60999 - DNA, 20 bp, Human papillomavirus type 137
gagtactgaccgccttttaa

SEQ ID NO: 61000 - DNA, 20 bp, Human papillomavirus type 137
taacagttggacatcctttc

SEQ ID NO: 61001 - DNA, 20 bp, Human papillomavirus type 137
aacagttggacatcctttct

SEQ ID NO: 61002 - DNA, 20 bp, Human papillomavirus type 137
acagttggacatcctttctt

SEQ ID NO: 61003 - DNA, 20 bp, Human papillomavirus type 137
gtataggtagtactggtcat

SEQ ID NO: 61004 - DNA, 20 bp, Human papillomavirus type 137
aacaaattgcaggatacaga

SEQ ID NO: 61005 - DNA, 20 bp, Human papillomavirus type 137
acaaattgcaggatacagaa

SEQ ID NO: 61006 - DNA, 20 bp, Human papillomavirus type 137
caggatacagaaaatccttc

SEQ ID NO: 61007 - DNA, 20 bp, Human papillomavirus type 137
tgtatataatggattaatca

SEQ ID NO: 61008 - DNA, 20 bp, Human papillomavirus type 137
gctcttctatttactttaca

SEQ ID NO: 61009 - DNA, 20 bp, Human papillomavirus type 137
tatttactttacaattccga

SEQ ID NO: 61010 - DNA, 20 bp, Human papillomavirus type 137
actttacaattccgagtggt

SEQ ID NO: 61011 - DNA, 20 bp, Human papillomavirus type 137
ctttacaattccgagtggtt

SEQ ID NO: 61012 - DNA, 20 bp, Human papillomavirus type 137
acaattccgagtggttcgtt

SEQ ID NO: 61013 - DNA, 20 bp, Human papillomavirus type 137
agatgagtgtgcaataaatg

SEQ ID NO: 61014 - DNA, 20 bp, Human papillomavirus type 137
acttgactcatgtggtctgc

SEQ ID NO: 61015 - DNA, 20 bp, Human papillomavirus type 137
actcatgtggtctgcatttt

SEQ ID NO: 61016 - DNA, 20 bp, Human papillomavirus type 137
ttgttaccccacccgacaat

SEQ ID NO: 61017 - DNA, 20 bp, Human papillomavirus type 137
tgttaccccacccgacaatt

SEQ ID NO: 61018 - DNA, 20 bp, Influenza B virus
aactgtacaaacattaaccc

SEQ ID NO: 61019 - DNA, 20 bp, Influenza B virus
accctattactcacatcagg

SEQ ID NO: 61020 - DNA, 20 bp, Influenza B virus
ctcacatcagggggagtatt

SEQ ID NO: 61021 - DNA, 20 bp, Influenza B virus
ttatcactatatgtgtcagc

SEQ ID NO: 61022 - DNA, 20 bp, Influenza B virus
tcactatatgtgtcagcctc

SEQ ID NO: 61023 - DNA, 20 bp, Influenza B virus
gccctcataggttcggagag

SEQ ID NO: 61024 - DNA, 20 bp, Influenza B virus
ggagagatcaaaggaaactc

SEQ ID NO: 61025 - DNA, 20 bp, Influenza B virus
ataataagagaaccttttgt

SEQ ID NO: 61026 - DNA, 20 bp, Influenza B virus
tgttgcttgtggaccaaaag

SEQ ID NO: 61027 - DNA, 20 bp, Influenza B virus
gttgcttgtggaccaaaaga

SEQ ID NO: 61028 - DNA, 20 bp, Influenza B virus
tccacatggcagcttggagc

SEQ ID NO: 61029 - DNA, 20 bp, Influenza B virus
ccacatggcagcttggagcg

SEQ ID NO: 61030 - DNA, 20 bp, Influenza B virus
cacatggcagcttggagcgg

SEQ ID NO: 61031 - DNA, 20 bp, Influenza B virus
gagcggatccgcatgccatg

SEQ ID NO: 61032 - DNA, 20 bp, Influenza B virus
atggtcctgacaatgatgca

SEQ ID NO: 61033 - DNA, 20 bp, Influenza B virus
caacaggaagagtggagcac

SEQ ID NO: 61034 - DNA, 20 bp, Influenza B virus
gccagcaataaaaccataga

SEQ ID NO: 61035 - DNA, 20 bp, Influenza B virus
tatggttttattgctggcga

SEQ ID NO: 61036 - DNA, 20 bp, Influenza B virus
tattgctggcgaacccgcat

SEQ ID NO: 61037 - DNA, 20 bp, Influenza B virus
attgctggcgaacccgcatg

SEQ ID NO: 61038 - DNA, 20 bp, Influenza B virus
cgaatctaatggagacaagt

SEQ ID NO: 61039 - DNA, 20 bp, Influenza B virus
gaggcatcaaaggaggattc

SEQ ID NO: 61040 - DNA, 20 bp, Influenza B virus
gtccatcaaagaatggcatc

SEQ ID NO: 61041 - DNA, 20 bp, Influenza B virus
caatcttagatgccattctt

SEQ ID NO: 61042 - DNA, 20 bp, Influenza B virus
gatgccattctttgatggac

SEQ ID NO: 61043 - DNA, 20 bp, Influenza B virus
tattgggatagagatggtac

SEQ ID NO: 61044 - DNA, 20 bp, Influenza B virus
ggatagagatggtacacgat

SEQ ID NO: 61045 - DNA, 20 bp, Influenza B virus
gcattcagctgcaacagcca

SEQ ID NO: 61046 - DNA, 20 bp, Influenza B virus
agctgcaacagccatttact

SEQ ID NO: 61047 - DNA, 20 bp, Influenza B virus
actgtttgatgggctcagga

SEQ ID NO: 61048 - DNA, 20 bp, Human papillomavirus type 49
ggcagcaacaccagaacgat

SEQ ID NO: 61049 - DNA, 20 bp, Human papillomavirus type 49
gcagcaacaccagaacgata

SEQ ID NO: 61050 - DNA, 20 bp, Human papillomavirus type 49
caatcgggcgcggtcacatt

SEQ ID NO: 61051 - DNA, 20 bp, Human papillomavirus type 49
aatcgggcgcggtcacatta

SEQ ID NO: 61052 - DNA, 20 bp, Human papillomavirus type 49
tacttagtcatctcttgtgg

SEQ ID NO: 61053 - DNA, 20 bp, Human papillomavirus type 49
cagagttatagaatgattgg

SEQ ID NO: 61054 - DNA, 20 bp, Human papillomavirus type 49
tagaatgattgggaaagaag

SEQ ID NO: 61055 - DNA, 20 bp, Human papillomavirus type 49
ggaaagaagttacaatacca

SEQ ID NO: 61056 - DNA, 20 bp, Human papillomavirus type 49
caataccagatataatacta

SEQ ID NO: 61057 - DNA, 20 bp, Human papillomavirus type 49
ggccagcccattgacctgca

SEQ ID NO: 61058 - DNA, 20 bp, Human papillomavirus type 49
ccaagaactgcttctggagg

SEQ ID NO: 61059 - DNA, 20 bp, Human papillomavirus type 49
caagaactgcttctggagga

SEQ ID NO: 61060 - DNA, 20 bp, Human papillomavirus type 49
tggaggaactgcaattcttg

SEQ ID NO: 61061 - DNA, 20 bp, Human papillomavirus type 49
ttgtgtcctcagtgtcgtga

SEQ ID NO: 61062 - DNA, 20 bp, Human papillomavirus type 49
tgtcctcagtgtcgtgaaga

SEQ ID NO: 61063 - DNA, 20 bp, Human papillomavirus type 49
gcgagatctgcttcgccagc

SEQ ID NO: 61064 - DNA, 20 bp, Human papillomavirus type 49
gccagcaggaatttgaggag

SEQ ID NO: 61065 - DNA, 20 bp, Human papillomavirus type 49
gaggagagcgcggagcaagt

SEQ ID NO: 61066 - DNA, 20 bp, Human papillomavirus type 49
aggagagcgcggagcaagta

SEQ ID NO: 61067 - DNA, 20 bp, Human papillomavirus type 49
aaacgaaagtatttcagtcc

SEQ ID NO: 61068 - DNA, 20 bp, Human papillomavirus type 49
gacctttctgaaatgataca

SEQ ID NO: 61069 - DNA, 20 bp, Human papillomavirus type 49
acctttctgaaatgatacaa

SEQ ID NO: 61070 - DNA, 20 bp, Human papillomavirus type 49
ctgaaatgatacaatgggcc

SEQ ID NO: 61071 - DNA, 20 bp, Human papillomavirus type 49
tgaaatgatacaatgggcct

SEQ ID NO: 61072 - DNA, 20 bp, Human papillomavirus type 49
atctgtgagatcgctatcat

SEQ ID NO: 61073 - DNA, 20 bp, Human papillomavirus type 49
ctgaccaaagctggaaatct

SEQ ID NO: 61074 - DNA, 20 bp, Human papillomavirus type 49
ttttgaaaggctttggacac

SEQ ID NO: 61075 - DNA, 20 bp, Human papillomavirus type 49
tttgaaaggctttggacaca

SEQ ID NO: 61076 - DNA, 20 bp, Human papillomavirus type 49
ttgaaaggctttggacacaa

SEQ ID NO: 61077 - DNA, 20 bp, Human papillomavirus type 49
tgaaaggctttggacacaat

SEQ ID NO: 61078 - DNA, 20 bp, Human papillomavirus type 49
gcatgatgctaactttgcaa

SEQ ID NO: 61079 - DNA, 20 bp, Human papillomavirus type 49
gcaaagttagcatcatgcca

SEQ ID NO: 61080 - DNA, 20 bp, Human papillomavirus type 49
caaagttagcatcatgccaa

SEQ ID NO: 61081 - DNA, 20 bp, Human papillomavirus type 49
gcatcatgccaatagcttgt

SEQ ID NO: 61082 - DNA, 20 bp, Human papillomavirus type 49
tttggctttggtttcagata

SEQ ID NO: 61083 - DNA, 20 bp, Human papillomavirus type 49
tgcaggtgcatattataagg

SEQ ID NO: 61084 - DNA, 20 bp, Human papillomavirus type 49
taaggatggaactatcaaac

SEQ ID NO: 61085 - DNA, 20 bp, Human papillomavirus type 49
tgttaccttcgctgatgatg

SEQ ID NO: 61086 - DNA, 20 bp, Human papillomavirus type 49
ccttcgctgatgatgctgtt

SEQ ID NO: 61087 - DNA, 20 bp, Human papillomavirus type 49
gctgatgatgctgttagata

SEQ ID NO: 61088 - DNA, 20 bp, Human papillomavirus type 49
acgacaccgtcgacgagaca

SEQ ID NO: 61089 - DNA, 20 bp, Human papillomavirus type 49
ctgtggtgctggtgggtgtc

SEQ ID NO: 61090 - DNA, 20 bp, Human papillomavirus type 49
cagatccagatccagatcca

SEQ ID NO: 61091 - DNA, 20 bp, Human papillomavirus type 49
cagaggatccagagggtccg

SEQ ID NO: 61092 - DNA, 20 bp, Human papillomavirus type 49
cagccccaagagaacccgca

SEQ ID NO: 61093 - DNA, 20 bp, Human papillomavirus type 49
tcttggggctggaatctctg

SEQ ID NO: 61094 - DNA, 20 bp, Human papillomavirus type 49
gggctggaatctctggaggt

SEQ ID NO: 61095 - DNA, 20 bp, Human papillomavirus type 49
gacgacttggaaggttactg

SEQ ID NO: 61096 - DNA, 20 bp, Human papillomavirus type 49
gaaggttactggaggaggct

SEQ ID NO: 61097 - DNA, 20 bp, Human papillomavirus type 49
ctggaggaggctagcgatcc

SEQ ID NO: 61098 - DNA, 20 bp, Human papillomavirus type 49
tgcgaggagacccaaatatt

SEQ ID NO: 61099 - DNA, 20 bp, Human papillomavirus type 49
gcgaggagacccaaatattt

SEQ ID NO: 61100 - DNA, 20 bp, Human papillomavirus type 49
ttgttactagtggttctggt

SEQ ID NO: 61101 - DNA, 20 bp, Human papillomavirus type 49
ttactagtggttctggtggt

SEQ ID NO: 61102 - DNA, 20 bp, Human papillomavirus type 49
ctagtggttctggtggtcaa

SEQ ID NO: 61103 - DNA, 20 bp, Human papillomavirus type 49
tggtggtcaaccaataggtg

SEQ ID NO: 61104 - DNA, 20 bp, Human papillomavirus type 49
caccagttgaaatagaatta

SEQ ID NO: 61105 - DNA, 20 bp, Human papillomavirus type 49
gctttgcctttgataatcct

SEQ ID NO: 61106 - DNA, 20 bp, Human papillomavirus type 49
gcctttgataatcctgtgtt

SEQ ID NO: 61107 - DNA, 20 bp, Human papillomavirus type 49
cctttgataatcctgtgttt

SEQ ID NO: 61108 - DNA, 20 bp, Human papillomavirus type 49
gataatcctgtgtttgaaga

SEQ ID NO: 61109 - DNA, 20 bp, Human papillomavirus type 49
ataatcctgtgtttgaagaa

SEQ ID NO: 61110 - DNA, 20 bp, Human papillomavirus type 49
tcactattaggggaacattc

SEQ ID NO: 61111 - DNA, 20 bp, Human papillomavirus type 49
ggggaacattctggtgatgc

SEQ ID NO: 61112 - DNA, 20 bp, Human papillomavirus type 49
tggtgatgctactattgtcc

SEQ ID NO: 61113 - DNA, 20 bp, Human papillomavirus type 49
tccaaggcccagtagaaagc

SEQ ID NO: 61114 - DNA, 20 bp, Human papillomavirus type 49
ctactgggccttggacaata

SEQ ID NO: 61115 - DNA, 20 bp, Human papillomavirus type 49
tctactcccagatctgatac

SEQ ID NO: 61116 - DNA, 20 bp, Human papillomavirus type 49
tatgtacaagatttggaagg

SEQ ID NO: 61117 - DNA, 20 bp, Human papillomavirus type 49
atgtacaagatttggaaggt

SEQ ID NO: 61118 - DNA, 20 bp, Human papillomavirus type 49
tgtacaagatttggaaggtt

SEQ ID NO: 61119 - DNA, 20 bp, Human papillomavirus type 49
ggaaggttatgctgtgtcat

SEQ ID NO: 61120 - DNA, 20 bp, Human papillomavirus type 49
aacacctgtggcaagggtac

SEQ ID NO: 61121 - DNA, 20 bp, Human papillomavirus type 49
agaggacagacatctactat

SEQ ID NO: 61122 - DNA, 20 bp, Human papillomavirus type 49
acaatcgatcactattagca

SEQ ID NO: 61123 - DNA, 20 bp, Human papillomavirus type 49
gcatgatagtagatgtctgt

SEQ ID NO: 61124 - DNA, 20 bp, Human papillomavirus type 49
atccgtgctttgtacccttg

SEQ ID NO: 61125 - DNA, 20 bp, Human papillomavirus type 49
gaaattggtcgtggccagcc

SEQ ID NO: 61126 - DNA, 20 bp, Human papillomavirus type 49
gtcgtggccagcctttaggt

SEQ ID NO: 61127 - DNA, 20 bp, Human papillomavirus type 49
aggtgttggtacaacaggac

SEQ ID NO: 61128 - DNA, 20 bp, Human papillomavirus type 49
ggtgttggtacaacaggaca

SEQ ID NO: 61129 - DNA, 20 bp, Human papillomavirus type 49
gtacaacaggacatccattg

SEQ ID NO: 61130 - DNA, 20 bp, Human papillomavirus type 49
tttgttagaggtggtaatgt

SEQ ID NO: 61131 - DNA, 20 bp, Human papillomavirus type 49
gttagaggtggtaatgtagg

SEQ ID NO: 61132 - DNA, 20 bp, Human papillomavirus type 49
ttagaggtggtaatgtaggg

SEQ ID NO: 61133 - DNA, 20 bp, Human papillomavirus type 49
gaggtggtaatgtaggggat

SEQ ID NO: 61134 - DNA, 20 bp, Human papillomavirus type 49
catattacctgcagcaagtc

SEQ ID NO: 61135 - DNA, 20 bp, Human papillomavirus type 49
tggactgtagatttaacaga

SEQ ID NO: 61136 - DNA, 20 bp, Human papillomavirus type 49
ggactgtagatttaacagaa

SEQ ID NO: 61137 - DNA, 20 bp, Human papillomavirus type 49
gactgtagatttaacagaaa

SEQ ID NO: 61138 - DNA, 20 bp, Human papillomavirus type 49
aacagaaaaactgtctttgg

SEQ ID NO: 61139 - DNA, 20 bp, Human papillomavirus type 49
acagaaaaactgtctttgga

SEQ ID NO: 61140 - DNA, 20 bp, Influenza A virus
gaatggaccaagcaatagtg

SEQ ID NO: 61141 - DNA, 20 bp, Influenza A virus
aaagcaaatttcagtgtgat

SEQ ID NO: 61142 - DNA, 20 bp, Influenza A virus
cagtgtgattttcaatcggc

SEQ ID NO: 61143 - DNA, 20 bp, Influenza A virus
agtgtgattttcaatcggct

SEQ ID NO: 61144 - DNA, 20 bp, Influenza A virus
tcaatcggcttgaagccctg

SEQ ID NO: 61145 - DNA, 20 bp, Influenza C virus
cgcaagagaaatggggaaat

SEQ ID NO: 61146 - DNA, 20 bp, Influenza C virus
ttactgttggggcactaatg

SEQ ID NO: 61147 - DNA, 20 bp, Influenza C virus
ctgttggggcactaatgact

SEQ ID NO: 61148 - DNA, 20 bp, Influenza C virus
gggcactaatgactgaatgt

SEQ ID NO: 61149 - DNA, 20 bp, Influenza C virus
cctgggaaaataaaagtggt

SEQ ID NO: 61150 - DNA, 20 bp, Influenza C virus
ggaagaaaaatggagagtta

SEQ ID NO: 61151 - DNA, 20 bp, Influenza C virus
attgctcaacctttaagaga

SEQ ID NO: 61152 - DNA, 20 bp, Influenza C virus
ctcaacctttaagagaagct

SEQ ID NO: 61153 - DNA, 20 bp, Influenza C virus
aagagaagctttaagagtac

SEQ ID NO: 61154 - DNA, 20 bp, Influenza C virus
agagaagctttaagagtaca

SEQ ID NO: 61155 - DNA, 20 bp, Human papillomavirus type 126
ttttgcctgcacctttgctt

SEQ ID NO: 61156 - DNA, 20 bp, Human papillomavirus type 126
tgcctgcacctttgctttgt

SEQ ID NO: 61157 - DNA, 20 bp, Human papillomavirus type 126
gcctgcacctttgctttgtg

SEQ ID NO: 61158 - DNA, 20 bp, Human papillomavirus type 126
cctgcacctttgctttgtga

SEQ ID NO: 61159 - DNA, 20 bp, Human papillomavirus type 126
gctttgtgaggagtcatcat

SEQ ID NO: 61160 - DNA, 20 bp, Human papillomavirus type 126
ctgagttaaaacgaaagtac

SEQ ID NO: 61161 - DNA, 20 bp, Human papillomavirus type 126
aaacgaaagtacaaaaaaag

SEQ ID NO: 61162 - DNA, 20 bp, Human papillomavirus type 126
tacggaacctacagttgctg

SEQ ID NO: 61163 - DNA, 20 bp, Human papillomavirus type 126
ctgctcttagtcctcgtttg

SEQ ID NO: 61164 - DNA, 20 bp, Human papillomavirus type 126
gtcctcgtttggaagcaata

SEQ ID NO: 61165 - DNA, 20 bp, Human papillomavirus type 126
atattggaaagtttggctaa

SEQ ID NO: 61166 - DNA, 20 bp, Human papillomavirus type 126
gaaagtttggctaaatccaa

SEQ ID NO: 61167 - DNA, 20 bp, Human papillomavirus type 126
ggctaaatccaagtatgcat

SEQ ID NO: 61168 - DNA, 20 bp, Human papillomavirus type 126
gctaaatccaagtatgcatc

SEQ ID NO: 61169 - DNA, 20 bp, Human papillomavirus type 126
gccgattgcagcgcagatcg

SEQ ID NO: 61170 - DNA, 20 bp, Human papillomavirus type 126
tatattatttgaaaaagatg

SEQ ID NO: 61171 - DNA, 20 bp, Human papillomavirus type 126
atattatttgaaaaagatgc

SEQ ID NO: 61172 - DNA, 20 bp, Human papillomavirus type 126
tattatttgaaaaagatgct

SEQ ID NO: 61173 - DNA, 20 bp, Human papillomavirus type 126
tttgaaaaagatgcttttag

SEQ ID NO: 61174 - DNA, 20 bp, Human papillomavirus type 126
gaaaaagatgcttttagata

SEQ ID NO: 61175 - DNA, 20 bp, Human papillomavirus type 126
cttgacactagcgtcactca

SEQ ID NO: 61176 - DNA, 20 bp, Human papillomavirus type 126
acactagcgtcactcacacc

SEQ ID NO: 61177 - DNA, 20 bp, Human papillomavirus type 126
gtctagggcatcacacacag

SEQ ID NO: 61178 - DNA, 20 bp, Human papillomavirus type 126
tctagggcatcacacacaga

SEQ ID NO: 61179 - DNA, 20 bp, Human papillomavirus type 126
ttggtctatctctccgccct

SEQ ID NO: 61180 - DNA, 20 bp, Human papillomavirus type 126
gtctatctctccgcccttca

SEQ ID NO: 61181 - DNA, 20 bp, Human papillomavirus type 126
agtgtcccagtttgaaaatc

SEQ ID NO: 61182 - DNA, 20 bp, Human papillomavirus type 126
gaaaatcccgcctttgatgc

SEQ ID NO: 61183 - DNA, 20 bp, Human papillomavirus type 126
aaaatcccgcctttgatgct

SEQ ID NO: 61184 - DNA, 20 bp, Human papillomavirus type 126
accatctggcataacattta

SEQ ID NO: 61185 - DNA, 20 bp, Human papillomavirus type 126
ccatctggcataacatttaa

SEQ ID NO: 61186 - DNA, 20 bp, Human papillomavirus type 126
aatgttatttctaacactga

SEQ ID NO: 61187 - DNA, 20 bp, Human papillomavirus type 126
atgttatttctaacactgac

SEQ ID NO: 61188 - DNA, 20 bp, Human papillomavirus type 126
tttctaacactgacaaagta

SEQ ID NO: 61189 - DNA, 20 bp, Human papillomavirus type 126
tacattcgcctatacaagat

SEQ ID NO: 61190 - DNA, 20 bp, Human papillomavirus type 126
gcctatacaagatggcgata

SEQ ID NO: 61191 - DNA, 20 bp, Human papillomavirus type 126
tataggcgaatgtataagtt

SEQ ID NO: 61192 - DNA, 20 bp, Human papillomavirus type 126
gataggagggcacgtaccct

SEQ ID NO: 61193 - DNA, 20 bp, Human papillomavirus type 126
ataggagggcacgtaccctt

SEQ ID NO: 61194 - DNA, 20 bp, Human papillomavirus type 126
tgtaaagatggagctgttgg

SEQ ID NO: 61195 - DNA, 20 bp, Human papillomavirus type 126
gtaaagatggagctgttggc

SEQ ID NO: 61196 - DNA, 20 bp, Human papillomavirus type 126
taaagatggagctgttggcg

SEQ ID NO: 61197 - DNA, 20 bp, Human papillomavirus type 126
gcgacagtatccctgaggat

SEQ ID NO: 61198 - DNA, 20 bp, Human papillomavirus type 126
atagtacatccagacacagg

SEQ ID NO: 61199 - DNA, 20 bp, Human papillomavirus type 126
ataaaatcactagctactat

SEQ ID NO: 61200 - DNA, 20 bp, Human papillomavirus type 126
taaaatcactagctactatc

SEQ ID NO: 61201 - DNA, 20 bp, Human papillomavirus type 126
aaatgggtctgcaggtggct

SEQ ID NO: 61202 - DNA, 20 bp, Human papillomavirus type 126
aatgggtctgcaggtggctt

SEQ ID NO: 61203 - DNA, 20 bp, Human papillomavirus type 126
tgttgagcgtctttaggaca

SEQ ID NO: 61204 - DNA, 20 bp, Human papillomavirus type 128
agtgtagacacatgctgtga

SEQ ID NO: 61205 - DNA, 20 bp, Human papillomavirus type 128
taaccgtcgagttagattag

SEQ ID NO: 61206 - DNA, 20 bp, Human papillomavirus type 128
gattagtagtatctgcaact

SEQ ID NO: 61207 - DNA, 20 bp, Human papillomavirus type 128
gtagtatctgcaactagcac

SEQ ID NO: 61208 - DNA, 20 bp, Human papillomavirus type 128
ttagatttcagcaactattg

SEQ ID NO: 61209 - DNA, 20 bp, Human papillomavirus type 128
cctggcactcttcaatgccc

SEQ ID NO: 61210 - DNA, 20 bp, Human papillomavirus type 128
aatgcccaagttacagagga

SEQ ID NO: 61211 - DNA, 20 bp, Human papillomavirus type 128
cagaggattcagatcgtgca

SEQ ID NO: 61212 - DNA, 20 bp, Human papillomavirus type 128
agatcgtgcagttttatttc

SEQ ID NO: 61213 - DNA, 20 bp, Human papillomavirus type 128
agaaataaaactgcacgatc

SEQ ID NO: 61214 - DNA, 20 bp, Human papillomavirus type 128
taatgaactatcacaggtag

SEQ ID NO: 61215 - DNA, 20 bp, Human papillomavirus type 128
aaaatggcgccgctattaat

SEQ ID NO: 61216 - DNA, 20 bp, Human papillomavirus type 128
atgacatacttaattgtaat

SEQ ID NO: 61217 - DNA, 20 bp, Human papillomavirus type 128
tgttattacaattaagtatg

SEQ ID NO: 61218 - DNA, 20 bp, Human papillomavirus type 128
gttattacaattaagtatgt

SEQ ID NO: 61219 - DNA, 20 bp, Human papillomavirus type 128
gattttaaaacattgtattg

SEQ ID NO: 61220 - DNA, 20 bp, Human papillomavirus type 128
taaaacattgtattgttaat

SEQ ID NO: 61221 - DNA, 20 bp, Human papillomavirus type 128
aaaacattgtattgttaatc

SEQ ID NO: 61222 - DNA, 20 bp, Human papillomavirus type 128
aaacattgtattgttaatca

SEQ ID NO: 61223 - DNA, 20 bp, Human papillomavirus type 128
tattgttaatcatcaaatgg

SEQ ID NO: 61224 - DNA, 20 bp, Human papillomavirus type 128
tctccagtctctgctgaaga

SEQ ID NO: 61225 - DNA, 20 bp, Human papillomavirus type 128
cgcgacatggtttatcgcga

SEQ ID NO: 61226 - DNA, 20 bp, Human papillomavirus type 128
atcgcgacttggaaggcttg

SEQ ID NO: 61227 - DNA, 20 bp, Human papillomavirus type 128
tcgcgacttggaaggcttga

SEQ ID NO: 61228 - DNA, 20 bp, Human papillomavirus type 128
gaaggcttgaagcagaagct

SEQ ID NO: 61229 - DNA, 20 bp, Human papillomavirus type 128
ggtctggtaaaggtactggt

SEQ ID NO: 61230 - DNA, 20 bp, Human papillomavirus type 128
ggtggtggaggaacagtttc

SEQ ID NO: 61231 - DNA, 20 bp, Human papillomavirus type 128
gtggtggaggaacagtttct

SEQ ID NO: 61232 - DNA, 20 bp, Human papillomavirus type 128
ctaggccaagtatacgtatt

SEQ ID NO: 61233 - DNA, 20 bp, Human papillomavirus type 128
taggccaagtatacgtattc

SEQ ID NO: 61234 - DNA, 20 bp, Human papillomavirus type 128
ttagctctggtactgggcct

SEQ ID NO: 61235 - DNA, 20 bp, Human papillomavirus type 128
gctctggtactgggcctaca

SEQ ID NO: 61236 - DNA, 20 bp, Human papillomavirus type 128
gatgttactacacagataga

SEQ ID NO: 61237 - DNA, 20 bp, Human papillomavirus type 128
ctacacagatagatttaaac

SEQ ID NO: 61238 - DNA, 20 bp, Human papillomavirus type 128
aaacacatttaataatataa

SEQ ID NO: 61239 - DNA, 20 bp, Human papillomavirus type 128
cagaggtgaccgccactcca

SEQ ID NO: 61240 - DNA, 20 bp, Human papillomavirus type 128
tagagatatcaattacctga

SEQ ID NO: 61241 - DNA, 20 bp, Human papillomavirus type 128
agagatatcaattacctgag

SEQ ID NO: 61242 - DNA, 20 bp, Human papillomavirus type 128
gagatatcaattacctgagt

SEQ ID NO: 61243 - DNA, 20 bp, Human papillomavirus type 128
cctgagtaggcctttttaca

SEQ ID NO: 61244 - DNA, 20 bp, Human papillomavirus type 128
aggtattggagctgttgggc

SEQ ID NO: 61245 - DNA, 20 bp, Human papillomavirus type 128
ggtattggagctgttgggca

SEQ ID NO: 61246 - DNA, 20 bp, Human papillomavirus type 128
gagctgttgggcatccgtta

SEQ ID NO: 61247 - DNA, 20 bp, Human papillomavirus type 128
ggcatccgttaatgaataaa

SEQ ID NO: 61248 - DNA, 20 bp, Human papillomavirus type 128
atgaataaatatggagattc

SEQ ID NO: 61249 - DNA, 20 bp, Human papillomavirus type 128
tggtgctgttaattttaaaa

SEQ ID NO: 61250 - DNA, 20 bp, Human papillomavirus type 128
ggtgctgttaattttaaaac

SEQ ID NO: 61251 - DNA, 20 bp, Human papillomavirus type 128
gtgctgttaattttaaaaca

SEQ ID NO: 61252 - DNA, 20 bp, Human papillomavirus type 128
attttaaaacattttctcaa

SEQ ID NO: 61253 - DNA, 20 bp, Human papillomavirus type 128
taaaacattttctcaagaca

SEQ ID NO: 61254 - DNA, 20 bp, Human papillomavirus type 128
gaagtcgaattagtctttcg

SEQ ID NO: 61255 - DNA, 20 bp, Human papillomavirus type 128
aagtcgaattagtctttcgt

SEQ ID NO: 61256 - DNA, 20 bp, Human papillomavirus type 128
gtctttcgtctttgtaaagt

SEQ ID NO: 61257 - DNA, 20 bp, Human papillomavirus type 128
cgtctttgtaaagtaccatt

SEQ ID NO: 61258 - DNA, 20 bp, Human papillomavirus type 128
gtctttgtaaagtaccatta

SEQ ID NO: 61259 - DNA, 20 bp, Human papillomavirus type 128
ccaggtgctatgccaaacca

SEQ ID NO: 61260 - DNA, 20 bp, Human papillomavirus type 128
caggtgctatgccaaaccat

SEQ ID NO: 61261 - DNA, 20 bp, Human papillomavirus type 128
aaataaaatgcagtgtttgc

SEQ ID NO: 61262 - DNA, 20 bp, Human papillomavirus type 128
gcaaaatactgactcatgtg

SEQ ID NO: 61263 - DNA, 20 bp, Human papillomavirus type 128
caaaatactgactcatgtgg

SEQ ID NO: 61264 - DNA, 20 bp, Human papillomavirus type 128
tcggtcgaggcaaggtgagt

SEQ ID NO: 61265 - DNA, 20 bp, Human papillomavirus type 128
cggtcgaggcaaggtgagta

SEQ ID NO: 61266 - DNA, 20 bp, Human papillomavirus type 128
ggtcgaggcaaggtgagtac

SEQ ID NO: 61267 - DNA, 20 bp, Human papillomavirus type 128
aaacaaactttgactgactc

SEQ ID NO: 61268 - DNA, 20 bp, Human papillomavirus type 128
gactgactcaaaatttggcg

SEQ ID NO: 61269 - DNA, 20 bp, Human papillomavirus type 144
tatatgtctggatttgttgg

SEQ ID NO: 61270 - DNA, 20 bp, Human papillomavirus type 144
gttggatgcagcagaaaagc

SEQ ID NO: 61271 - DNA, 20 bp, Human papillomavirus type 144
ttggatgcagcagaaaagca

SEQ ID NO: 61272 - DNA, 20 bp, Human papillomavirus type 144
gatgcagcagaaaagcaaga

SEQ ID NO: 61273 - DNA, 20 bp, Human papillomavirus type 144
ctagaggcaaaaggtttata

SEQ ID NO: 61274 - DNA, 20 bp, Human papillomavirus type 144
tacactccaccgactctgga

SEQ ID NO: 61275 - DNA, 20 bp, Human papillomavirus type 144
ttcgatttattgctcgaaga

SEQ ID NO: 61276 - DNA, 20 bp, Human papillomavirus type 144
gatttattgctcgaagaatt

SEQ ID NO: 61277 - DNA, 20 bp, Human papillomavirus type 144
attgctcgaagaattatcat

SEQ ID NO: 61278 - DNA, 20 bp, Human papillomavirus type 144
ttgctcgaagaattatcatt

SEQ ID NO: 61279 - DNA, 20 bp, Human papillomavirus type 144
ggagacagtggcatagagga

SEQ ID NO: 61280 - DNA, 20 bp, Human papillomavirus type 144
gagacagtggcatagaggaa

SEQ ID NO: 61281 - DNA, 20 bp, Human papillomavirus type 144
ttacacaggtagacactaac

SEQ ID NO: 61282 - DNA, 20 bp, Human papillomavirus type 144
cacaggtagacactaactca

SEQ ID NO: 61283 - DNA, 20 bp, Human papillomavirus type 144
acccagctcactactatttg

SEQ ID NO: 61284 - DNA, 20 bp, Human papillomavirus type 144
ctgaatggttagcaaagcaa

SEQ ID NO: 61285 - DNA, 20 bp, Human papillomavirus type 144
gcaaagcaagtattggtaga

SEQ ID NO: 61286 - DNA, 20 bp, Human papillomavirus type 144
gtagaacatcaatcagctgc

SEQ ID NO: 61287 - DNA, 20 bp, Human papillomavirus type 144
gaattagctacaatggtaca

SEQ ID NO: 61288 - DNA, 20 bp, Human papillomavirus type 144
aattagctacaatggtacag

SEQ ID NO: 61289 - DNA, 20 bp, Human papillomavirus type 144
catccggaggacttcaaacc

SEQ ID NO: 61290 - DNA, 20 bp, Human papillomavirus type 144
gaagtcctccggatggaact

SEQ ID NO: 61291 - DNA, 20 bp, Human papillomavirus type 144
aagtcctccggatggaactt

SEQ ID NO: 61292 - DNA, 20 bp, Human papillomavirus type 144
ctgctgggcctcggtgtcgg

SEQ ID NO: 61293 - DNA, 20 bp, Human papillomavirus type 144
tgctgggcctcggtgtcggt

SEQ ID NO: 61294 - DNA, 20 bp, Human papillomavirus type 144
gacgactacaagaagaagct

SEQ ID NO: 61295 - DNA, 20 bp, Human papillomavirus type 144
ctccagcatttaaggggatt

SEQ ID NO: 61296 - DNA, 20 bp, Human papillomavirus type 144
tccagcatttaaggggattt

SEQ ID NO: 61297 - DNA, 20 bp, Human papillomavirus type 144
aaggggatttgcaggacctt

SEQ ID NO: 61298 - DNA, 20 bp, Human papillomavirus type 144
aggggatttgcaggaccttt

SEQ ID NO: 61299 - DNA, 20 bp, Human papillomavirus type 144
ggtatagaccattgacacca

SEQ ID NO: 61300 - DNA, 20 bp, Human papillomavirus type 144
acaccatctacaccacgcgt

SEQ ID NO: 61301 - DNA, 20 bp, Human papillomavirus type 144
cctgaagggacaatagtaag

SEQ ID NO: 61302 - DNA, 20 bp, Human papillomavirus type 144
ctattgtcccttcaggtaat

SEQ ID NO: 61303 - DNA, 20 bp, Human papillomavirus type 144
tcccttcaggtaatacgcgt

SEQ ID NO: 61304 - DNA, 20 bp, Human papillomavirus type 144
gcttaccagaaagtacacct

SEQ ID NO: 61305 - DNA, 20 bp, Human papillomavirus type 144
ccagaaagtacacctactgt

SEQ ID NO: 61306 - DNA, 20 bp, Human papillomavirus type 144
gatatatctcctgcacaacc

SEQ ID NO: 61307 - DNA, 20 bp, Human papillomavirus type 144
aacacgaccctccaccacta

SEQ ID NO: 61308 - DNA, 20 bp, Human papillomavirus type 144
acacgaccctccaccactat

SEQ ID NO: 61309 - DNA, 20 bp, Human papillomavirus type 144
gaggatataagctctattaa

SEQ ID NO: 61310 - DNA, 20 bp, Human papillomavirus type 144
acccaccaaaaacaagcact

SEQ ID NO: 61311 - DNA, 20 bp, Human papillomavirus type 144
cacccgtcgaccgtaaaagt

SEQ ID NO: 61312 - DNA, 20 bp, Human papillomavirus type 144
cttgctctttgtgttagccg

SEQ ID NO: 61313 - DNA, 20 bp, Human papillomavirus type 144
ctctttgtgttagccgtggc

SEQ ID NO: 61314 - DNA, 20 bp, Human papillomavirus type 144
tgatcccaaacaaacacagc

SEQ ID NO: 61315 - DNA, 20 bp, Human papillomavirus type 144
gatcccaaacaaacacagct

SEQ ID NO: 61316 - DNA, 20 bp, Human papillomavirus type 144
atcccaaacaaacacagcta

SEQ ID NO: 61317 - DNA, 20 bp, Human papillomavirus type 144
atagtaggttgtacaccttc

SEQ ID NO: 61318 - DNA, 20 bp, Human papillomavirus type 144
tagtaggttgtacaccttca

SEQ ID NO: 61319 - DNA, 20 bp, Human papillomavirus type 144
ttcacagtacttgcaaatgg

SEQ ID NO: 61320 - DNA, 20 bp, Human papillomavirus type 144
acagtacttgcaaatggcct

SEQ ID NO: 61321 - DNA, 20 bp, Human papillomavirus type 144
caaatggcctgatttcttaa

SEQ ID NO: 61322 - DNA, 20 bp, Human papillomavirus type 144
cttaaaaatgactaaagata

SEQ ID NO: 61323 - DNA, 20 bp, Human papillomavirus type 144
ttaaaaatgactaaagatat

SEQ ID NO: 61324 - DNA, 20 bp, Human papillomavirus type 144
gaaaattgatatgactgagc

SEQ ID NO: 61325 - DNA, 20 bp, Human papillomavirus type 144
atatgactgagcgtttttct

SEQ ID NO: 61326 - DNA, 20 bp, Human papillomavirus type 144
ttctactgaattatcacagt

SEQ ID NO: 61327 - DNA, 20 bp, Human papillomavirus type 144
tctactgaattatcacagtt

SEQ ID NO: 61328 - DNA, 20 bp, Human papillomavirus type 144
ctactgaattatcacagttt

SEQ ID NO: 61329 - DNA, 20 bp, Human papillomavirus type 144
gtcaatatttaaaataccgc

SEQ ID NO: 61330 - DNA, 20 bp, Human papillomavirus type 144
aaaataccgcacccctgttt

SEQ ID NO: 61331 - DNA, 20 bp, Human papillomavirus type 144
aaataccgcacccctgttta

SEQ ID NO: 61332 - DNA, 20 bp, Human papillomavirus type 144
acctatgaacatccggacct

SEQ ID NO: 61333 - DNA, 20 bp, Human papillomavirus type 144
cctatgaacatccggacctc

SEQ ID NO: 61334 - DNA, 20 bp, Human papillomavirus type 144
tcggtacacggactgtgcca

SEQ ID NO: 61335 - DNA, 20 bp, Human papillomavirus type 144
taacaagaggtgactgactc

SEQ ID NO: 61336 - DNA, 20 bp, Human papillomavirus type 144
aacaagaggtgactgactca

SEQ ID NO: 61337 - DNA, 20 bp, Human papillomavirus type 144
acaagaggtgactgactcaa

SEQ ID NO: 61338 - DNA, 20 bp, Human papillomavirus type 144
ttggacagattgtgtatctg

SEQ ID NO: 61339 - DNA, 20 bp, Influenza A virus
tgaacagatggaaactgatg

SEQ ID NO: 61340 - DNA, 20 bp, Influenza A virus
gggcatccgtcgggaagatg

SEQ ID NO: 61341 - DNA, 20 bp, Influenza A virus
ccgacggatgccctaatctc

SEQ ID NO: 61342 - DNA, 20 bp, Influenza A virus
cattctggcgatccccatca

SEQ ID NO: 61343 - DNA, 20 bp, Influenza A virus
tggcgatccccatcagtttc

SEQ ID NO: 61344 - DNA, 20 bp, Influenza A virus
ttggcaagatctgcattgat

SEQ ID NO: 61345 - DNA, 20 bp, Influenza A virus
tggcaagatctgcattgata

SEQ ID NO: 61346 - DNA, 20 bp, Influenza A virus
ggcaagatctgcattgatat

SEQ ID NO: 61347 - DNA, 20 bp, Influenza A virus
gcaagatctgcattgatatt

SEQ ID NO: 61348 - DNA, 20 bp, Influenza A virus
atattgagagggtcagttgc

SEQ ID NO: 61349 - DNA, 20 bp, Influenza A virus
tgctgcatttgaagatttaa

SEQ ID NO: 61350 - DNA, 20 bp, Influenza A virus
gaagatttaagattgttaag

SEQ ID NO: 61351 - DNA, 20 bp, Influenza A virus
aagatttaagattgttaagc

SEQ ID NO: 61352 - DNA, 20 bp, Influenza A virus
aagattgttaagcttcatca

SEQ ID NO: 61353 - DNA, 20 bp, Influenza A virus
agattgttaagcttcatcag

SEQ ID NO: 61354 - DNA, 20 bp, Influenza A virus
gaaaagtcaaccatcatggc

SEQ ID NO: 61355 - DNA, 20 bp, Influenza A virus
aaaagtcaaccatcatggca

SEQ ID NO: 61356 - DNA, 20 bp, Influenza A virus
actggaaatacggagggaag

SEQ ID NO: 61357 - DNA, 20 bp, Influenza A virus
agacatgagggcagaaatca

SEQ ID NO: 61358 - DNA, 20 bp, Influenza A virus
ttatgatttctgccctcatg

SEQ ID NO: 61359 - DNA, 20 bp, Human papillomavirus type 30
caaatttgaaaatacaggcg

SEQ ID NO: 61360 - DNA, 20 bp, Human papillomavirus type 30
aaatttgaaaatacaggcga

SEQ ID NO: 61361 - DNA, 20 bp, Human papillomavirus type 30
gaaaatacaggcgagcgccc

SEQ ID NO: 61362 - DNA, 20 bp, Human papillomavirus type 30
aaaatacaggcgagcgccca

SEQ ID NO: 61363 - DNA, 20 bp, Human papillomavirus type 30
tcaaatttgaaagccatggg

SEQ ID NO: 61364 - DNA, 20 bp, Human papillomavirus type 30
tggaccttgtaccgcaaact

SEQ ID NO: 61365 - DNA, 20 bp, Human papillomavirus type 30
ggaccttgtaccgcaaactg

SEQ ID NO: 61366 - DNA, 20 bp, Human papillomavirus type 30
gaccttgtaccgcaaactga

SEQ ID NO: 61367 - DNA, 20 bp, Human papillomavirus type 30
taccgcaaactgaaattgac

SEQ ID NO: 61368 - DNA, 20 bp, Human papillomavirus type 30
acctgcattgctatgagcaa

SEQ ID NO: 61369 - DNA, 20 bp, Human papillomavirus type 30
ttgcatgcccaaaacacata

SEQ ID NO: 61370 - DNA, 20 bp, Human papillomavirus type 30
catgcccaaaacacatatgc

SEQ ID NO: 61371 - DNA, 20 bp, Human papillomavirus type 30
aaaacgaaagtatttaggca

SEQ ID NO: 61372 - DNA, 20 bp, Human papillomavirus type 30
aaacgaaagtatttaggcag

SEQ ID NO: 61373 - DNA, 20 bp, Human papillomavirus type 30
aggcagtccgttgggagaca

SEQ ID NO: 61374 - DNA, 20 bp, Human papillomavirus type 30
ctagattttaataattcttg

SEQ ID NO: 61375 - DNA, 20 bp, Human papillomavirus type 30
taataattcttgtatttgct

SEQ ID NO: 61376 - DNA, 20 bp, Human papillomavirus type 30
aataattcttgtatttgctg

SEQ ID NO: 61377 - DNA, 20 bp, Human papillomavirus type 30
ataattcttgtatttgctgt

SEQ ID NO: 61378 - DNA, 20 bp, Human papillomavirus type 30
ttgtatttgctgtggtggcg

SEQ ID NO: 61379 - DNA, 20 bp, Human papillomavirus type 30
gaactgtcgaaaatggtgca

SEQ ID NO: 61380 - DNA, 20 bp, Human papillomavirus type 30
aactgtcgaaaatggtgcaa

SEQ ID NO: 61381 - DNA, 20 bp, Human papillomavirus type 30
gataatgacgtaacagatga

SEQ ID NO: 61382 - DNA, 20 bp, Human papillomavirus type 30
ataatgacgtaacagatgac

SEQ ID NO: 61383 - DNA, 20 bp, Human papillomavirus type 30
cattttactatgcacagtta

SEQ ID NO: 61384 - DNA, 20 bp, Human papillomavirus type 30
tacagtttttaagatatcaa

SEQ ID NO: 61385 - DNA, 20 bp, Human papillomavirus type 30
ttaagatatcaaggggtcga

SEQ ID NO: 61386 - DNA, 20 bp, Human papillomavirus type 30
taagatatcaaggggtcgac

SEQ ID NO: 61387 - DNA, 20 bp, Human papillomavirus type 30
aagatatcaaggggtcgact

SEQ ID NO: 61388 - DNA, 20 bp, Human papillomavirus type 30
agatatcaaggggtcgactt

SEQ ID NO: 61389 - DNA, 20 bp, Human papillomavirus type 30
attgtcccgactctgtgtct

SEQ ID NO: 61390 - DNA, 20 bp, Human papillomavirus type 30
ttgtcccgactctgtgtcta

SEQ ID NO: 61391 - DNA, 20 bp, Human papillomavirus type 30
tcccgactctgtgtctagta

SEQ ID NO: 61392 - DNA, 20 bp, Human papillomavirus type 30
gatctgagggtactagacac

SEQ ID NO: 61393 - DNA, 20 bp, Human papillomavirus type 30
catttcccatatgcacttcc

SEQ ID NO: 61394 - DNA, 20 bp, Human papillomavirus type 30
tatattgcaaccattgtttt

SEQ ID NO: 61395 - DNA, 20 bp, Human papillomavirus type 30
caaccattgttttatttgtt

SEQ ID NO: 61396 - DNA, 20 bp, Human papillomavirus type 30
ttttatttgttagttttgtg

SEQ ID NO: 61397 - DNA, 20 bp, Human papillomavirus type 30
tatttgttagttttgtgttt

SEQ ID NO: 61398 - DNA, 20 bp, Human papillomavirus type 30
atttgttagttttgtgtttt

SEQ ID NO: 61399 - DNA, 20 bp, Human papillomavirus type 30
ttttgtaacatattacactt

SEQ ID NO: 61400 - DNA, 20 bp, Human papillomavirus type 30
tgtaacatattacacttttg

SEQ ID NO: 61401 - DNA, 20 bp, Human papillomavirus type 30
gtaacatattacacttttgc

SEQ ID NO: 61402 - DNA, 20 bp, Human papillomavirus type 30
taacatattacacttttgct

SEQ ID NO: 61403 - DNA, 20 bp, Human papillomavirus type 30
cacttttgctttgtgtaggg

SEQ ID NO: 61404 - DNA, 20 bp, Human papillomavirus type 30
taccaatccctcctttgttg

SEQ ID NO: 61405 - DNA, 20 bp, Human papillomavirus type 30
accaatccctcctttgttga

SEQ ID NO: 61406 - DNA, 20 bp, Human papillomavirus type 30
ccaatccctcctttgttgaa

SEQ ID NO: 61407 - DNA, 20 bp, Human papillomavirus type 30
gttgaacccccagttattga

SEQ ID NO: 61408 - DNA, 20 bp, Human papillomavirus type 30
ttgaacccccagttattgag

SEQ ID NO: 61409 - DNA, 20 bp, Human papillomavirus type 30
aaccttttcaccatcgggtg

SEQ ID NO: 61410 - DNA, 20 bp, Human papillomavirus type 30
accttttcaccatcgggtgt

SEQ ID NO: 61411 - DNA, 20 bp, Human papillomavirus type 30
tcaccatcgggtgtggcacc

SEQ ID NO: 61412 - DNA, 20 bp, Human papillomavirus type 30
caccatcgggtgtggcacct

SEQ ID NO: 61413 - DNA, 20 bp, Human papillomavirus type 30
accatcgggtgtggcacctg

SEQ ID NO: 61414 - DNA, 20 bp, Human papillomavirus type 30
gctttatggcctgtatactt

SEQ ID NO: 61415 - DNA, 20 bp, Human papillomavirus type 30
ctttatggcctgtatacttt

SEQ ID NO: 61416 - DNA, 20 bp, Human papillomavirus type 30
atggcctgtatactttttaa

SEQ ID NO: 61417 - DNA, 20 bp, Human papillomavirus type 30
tggcctgtatactttttaag

SEQ ID NO: 61418 - DNA, 20 bp, Human papillomavirus type 30
ttaaggcgtaggcgtcgtaa

SEQ ID NO: 61419 - DNA, 20 bp, Human papillomavirus type 30
gacatccatattattctatt

SEQ ID NO: 61420 - DNA, 20 bp, Human papillomavirus type 30
ttctatttctaaggctggta

SEQ ID NO: 61421 - DNA, 20 bp, Human papillomavirus type 30
tatttctaaggctggtaatt

SEQ ID NO: 61422 - DNA, 20 bp, Human papillomavirus type 30
ctaaggctggtaattccaaa

SEQ ID NO: 61423 - DNA, 20 bp, Human papillomavirus type 30
taaggctggtaattccaaaa

SEQ ID NO: 61424 - DNA, 20 bp, Human papillomavirus type 30
gttggggcaaccaggtattt

SEQ ID NO: 61425 - DNA, 20 bp, Human papillomavirus type 30
ttggggcaaccaggtatttg

SEQ ID NO: 61426 - DNA, 20 bp, Human papillomavirus type 30
gggcaaccaggtatttgtta

SEQ ID NO: 61427 - DNA, 20 bp, Human papillomavirus type 30
gttactgttgtggacaccac

SEQ ID NO: 61428 - DNA, 20 bp, Human papillomavirus type 30
ttactgttgtggacaccact

SEQ ID NO: 61429 - DNA, 20 bp, Human papillomavirus type 30
agggctggaatattggattg

SEQ ID NO: 61430 - DNA, 20 bp, Human papillomavirus type 30
gattgtcacccccagctgcc

SEQ ID NO: 61431 - DNA, 20 bp, Human papillomavirus type 30
tcacccccagctgccacaag

SEQ ID NO: 61432 - DNA, 20 bp, Human papillomavirus type 30
gaggacaaatacagatatgt

SEQ ID NO: 61433 - DNA, 20 bp, Human papillomavirus type 30
aaagccttgctataacctgt

SEQ ID NO: 61434 - DNA, 20 bp, Human papillomavirus type 30
ctctacctctacaccatcag

SEQ ID NO: 61435 - DNA, 20 bp, Human papillomavirus type 30
tttgtgtctgtgtatgtttc

SEQ ID NO: 61436 - DNA, 20 bp, Human papillomavirus type 30
gtgtctgtgtatgtttcctt

SEQ ID NO: 61437 - DNA, 20 bp, Human papillomavirus type 30
tgtctgtgtatgtttcctta

SEQ ID NO: 61438 - DNA, 20 bp, Human papillomavirus type 30
cgtttggctgatggtgtaga

SEQ ID NO: 61439 - DNA, 20 bp, Human papillomavirus type 30
aggtagcaatttaggtggcg

SEQ ID NO: 61440 - DNA, 20 bp, Human papillomavirus type 30
ggtagcaatttaggtggcgt

SEQ ID NO: 61441 - DNA, 20 bp, Human papillomavirus type 30
aggtggcgtccctatgtcct

SEQ ID NO: 61442 - DNA, 20 bp, Human papillomavirus type 30
ggtggcgtccctatgtcctc

SEQ ID NO: 61443 - DNA, 20 bp, Human papillomavirus type 30
ttggttgttgcacaccactg

SEQ ID NO: 61444 - DNA, 20 bp, Human papillomavirus type 30
ttagtcatatatgtatgctg

SEQ ID NO: 61445 - DNA, 20 bp, Human papillomavirus type 30
gtcatatatgtatgctgcca

SEQ ID NO: 61446 - DNA, 20 bp, Human papillomavirus type 30
tatcagcatactttactgct

SEQ ID NO: 61447 - DNA, 20 bp, Human papillomavirus type 30
atcagcatactttactgctg

SEQ ID NO: 61448 - DNA, 20 bp, Human papillomavirus type 30
tcagcatactttactgctgt

SEQ ID NO: 61449 - DNA, 20 bp, Human papillomavirus type 34
ggaaatgttttttcccaatc

SEQ ID NO: 61450 - DNA, 20 bp, Human papillomavirus type 34
tttcccaatcctgaggaacg

SEQ ID NO: 61451 - DNA, 20 bp, Human papillomavirus type 34
ttcccaatcctgaggaacgg

SEQ ID NO: 61452 - DNA, 20 bp, Human papillomavirus type 34
tcccaatcctgaggaacggc

SEQ ID NO: 61453 - DNA, 20 bp, Human papillomavirus type 34
cccaatcctgaggaacggcc

SEQ ID NO: 61454 - DNA, 20 bp, Human papillomavirus type 34
tgttagatctgaaaccaacg

SEQ ID NO: 61455 - DNA, 20 bp, Human papillomavirus type 34
gatctgaaaccaacgaccga

SEQ ID NO: 61456 - DNA, 20 bp, Human papillomavirus type 34
catgttacgagtcattagac

SEQ ID NO: 61457 - DNA, 20 bp, Human papillomavirus type 34
cgagtcattagacaactcag

SEQ ID NO: 61458 - DNA, 20 bp, Human papillomavirus type 34
gacaactcagaggatgagga

SEQ ID NO: 61459 - DNA, 20 bp, Human papillomavirus type 34
cagacgcctataacagaaga

SEQ ID NO: 61460 - DNA, 20 bp, Human papillomavirus type 34
aggtaattgggaagggaggt

SEQ ID NO: 61461 - DNA, 20 bp, Human papillomavirus type 34
ggaagggaggtgttcgggat

SEQ ID NO: 61462 - DNA, 20 bp, Human papillomavirus type 34
gggatggtttaatgtagaag

SEQ ID NO: 61463 - DNA, 20 bp, Human papillomavirus type 34
aatgtagaagccattgtaga

SEQ ID NO: 61464 - DNA, 20 bp, Human papillomavirus type 34
gaggactgtcaatttgacct

SEQ ID NO: 61465 - DNA, 20 bp, Human papillomavirus type 34
gacctatctcaaatggtaca

SEQ ID NO: 61466 - DNA, 20 bp, Human papillomavirus type 34
acctatctcaaatggtacag

SEQ ID NO: 61467 - DNA, 20 bp, Human papillomavirus type 34
gataatgacataacaaatga

SEQ ID NO: 61468 - DNA, 20 bp, Human papillomavirus type 34
ataatgacataacaaatgac

SEQ ID NO: 61469 - DNA, 20 bp, Human papillomavirus type 34
gctgatgcaaaaatggcatt

SEQ ID NO: 61470 - DNA, 20 bp, Human papillomavirus type 34
ttagatgatgcaacacctgc

SEQ ID NO: 61471 - DNA, 20 bp, Human papillomavirus type 34
gatgatgcaacacctgcatg

SEQ ID NO: 61472 - DNA, 20 bp, Human papillomavirus type 34
atagatatttaagaaatgca

SEQ ID NO: 61473 - DNA, 20 bp, Human papillomavirus type 34
aagaaatgcattagatggca

SEQ ID NO: 61474 - DNA, 20 bp, Human papillomavirus type 34
ccatttgacagtaatggaaa

SEQ ID NO: 61475 - DNA, 20 bp, Human papillomavirus type 34
catttgacagtaatggaaat

SEQ ID NO: 61476 - DNA, 20 bp, Human papillomavirus type 34
gacagtaatggaaatccact

SEQ ID NO: 61477 - DNA, 20 bp, Human papillomavirus type 34
acagtaatggaaatccacta

SEQ ID NO: 61478 - DNA, 20 bp, Human papillomavirus type 34
ctaatgaaaactggaaggca

SEQ ID NO: 61479 - DNA, 20 bp, Human papillomavirus type 34
accaacaagcggtgccaagc

SEQ ID NO: 61480 - DNA, 20 bp, Human papillomavirus type 34
cagtatcacgatccaaaggg

SEQ ID NO: 61481 - DNA, 20 bp, Human papillomavirus type 34
aactacaattagccctagaa

SEQ ID NO: 61482 - DNA, 20 bp, Human papillomavirus type 34
gccctagaaagtttaaatga

SEQ ID NO: 61483 - DNA, 20 bp, Human papillomavirus type 34
aaactttctagggctaattg

SEQ ID NO: 61484 - DNA, 20 bp, Human papillomavirus type 34
caaaggttgagggcaatact

SEQ ID NO: 61485 - DNA, 20 bp, Human papillomavirus type 34
agggcaatactttagctgac

SEQ ID NO: 61486 - DNA, 20 bp, Human papillomavirus type 34
agctgaccaaatattaaaat

SEQ ID NO: 61487 - DNA, 20 bp, Human papillomavirus type 34
gctgaccaaatattaaaata

SEQ ID NO: 61488 - DNA, 20 bp, Human papillomavirus type 34
aaatatggtagcattggggt

SEQ ID NO: 61489 - DNA, 20 bp, Human papillomavirus type 34
tattgaagctggtgtgccag

SEQ ID NO: 61490 - DNA, 20 bp, Human papillomavirus type 34
attgaagctggtgtgccagg

SEQ ID NO: 61491 - DNA, 20 bp, Human papillomavirus type 34
ttgaagctggtgtgccaggt

SEQ ID NO: 61492 - DNA, 20 bp, Human papillomavirus type 34
aagctggtgtgccaggtcct

SEQ ID NO: 61493 - DNA, 20 bp, Human papillomavirus type 34
tagttctggatttaatgtaa

SEQ ID NO: 61494 - DNA, 20 bp, Human papillomavirus type 34
cataatgctcctgactctga

SEQ ID NO: 61495 - DNA, 20 bp, Human papillomavirus type 34
tttagatattgtaaagttac

SEQ ID NO: 61496 - DNA, 20 bp, Human papillomavirus type 34
ttagatattgtaaagttaca

SEQ ID NO: 61497 - DNA, 20 bp, Human papillomavirus type 34
tagatattgtaaagttacat

SEQ ID NO: 61498 - DNA, 20 bp, Human papillomavirus type 34
agatattgtaaagttacata

SEQ ID NO: 61499 - DNA, 20 bp, Human papillomavirus type 34
catcctagcttgtatgtcat

SEQ ID NO: 61500 - DNA, 20 bp, Human papillomavirus type 34
tatgtcattccacgcaaacg

SEQ ID NO: 61501 - DNA, 20 bp, Human papillomavirus type 34
cacgcaaacgtaaacgtttg

SEQ ID NO: 61502 - DNA, 20 bp, Human papillomavirus type 34
gtcatatttttttgcagatg

SEQ ID NO: 61503 - DNA, 20 bp, Human papillomavirus type 34
tcatatttttttgcagatgt

SEQ ID NO: 61504 - DNA, 20 bp, Human papillomavirus type 34
tgtattgtaggctgtaagcc

SEQ ID NO: 61505 - DNA, 20 bp, Human papillomavirus type 34
taggctgtaagcctccctta

SEQ ID NO: 61506 - DNA, 20 bp, Human papillomavirus type 34
ggggaacattggggtacagg

SEQ ID NO: 61507 - DNA, 20 bp, Human papillomavirus type 34
gggtacaggcacaccatgtg

SEQ ID NO: 61508 - DNA, 20 bp, Human papillomavirus type 34
cccagcattttgggtaccac

SEQ ID NO: 61509 - DNA, 20 bp, Human papillomavirus type 34
tatgtggttttatattcgta

SEQ ID NO: 61510 - DNA, 20 bp, Human papillomavirus type 34
tatattcgtagggaacaaat

SEQ ID NO: 61511 - DNA, 20 bp, Human papillomavirus type 34
atattcgtagggaacaaatg

SEQ ID NO: 61512 - DNA, 20 bp, Human papillomavirus type 34
tattcgtagggaacaaatgt

SEQ ID NO: 61513 - DNA, 20 bp, Human papillomavirus type 34
gtagggaacaaatgtttgtt

SEQ ID NO: 61514 - DNA, 20 bp, Human papillomavirus type 34
tgttcattcgccattttata

SEQ ID NO: 61515 - DNA, 20 bp, Human papillomavirus type 34
gttcattcgccattttatat

SEQ ID NO: 61516 - DNA, 20 bp, Human papillomavirus type 34
ttcattcgccattttatata

SEQ ID NO: 61517 - DNA, 20 bp, Human papillomavirus type 34
attcgccattttatatattt

SEQ ID NO: 61518 - DNA, 20 bp, Human papillomavirus type 34
gccattttatatattttaaa

SEQ ID NO: 61519 - DNA, 20 bp, Influenza A virus
gttaccatgcaaacaactcg

SEQ ID NO: 61520 - DNA, 20 bp, Influenza A virus
ccatgcaaacaactcgacag

SEQ ID NO: 61521 - DNA, 20 bp, Influenza A virus
acacaataatggaaaagaac

SEQ ID NO: 61522 - DNA, 20 bp, Influenza A virus
ctgttacacatgcccaagac

SEQ ID NO: 61523 - DNA, 20 bp, Influenza A virus
cacatgcccaagacatactg

SEQ ID NO: 61524 - DNA, 20 bp, Influenza A virus
catagtggagaaggccagtc

SEQ ID NO: 61525 - DNA, 20 bp, Influenza A virus
cccaggggatttcaacgact

SEQ ID NO: 61526 - DNA, 20 bp, Influenza A virus
caacgactatgaagaactga

SEQ ID NO: 61527 - DNA, 20 bp, Influenza A virus
aacgactatgaagaactgaa

SEQ ID NO: 61528 - DNA, 20 bp, Influenza A virus
cagttcttcatagtcgttga

SEQ ID NO: 61529 - DNA, 20 bp, Influenza A virus
tagtactgtgggggattcac

SEQ ID NO: 61530 - DNA, 20 bp, Influenza A virus
agtactgtgggggattcacc

SEQ ID NO: 61531 - DNA, 20 bp, Influenza A virus
gtactgtgggggattcacca

SEQ ID NO: 61532 - DNA, 20 bp, Influenza A virus
accatcctaatgatgcggca

SEQ ID NO: 61533 - DNA, 20 bp, Influenza A virus
ggttttgatagagctttgtc

SEQ ID NO: 61534 - DNA, 20 bp, Influenza A virus
cattgctccagaatatgcat

SEQ ID NO: 61535 - DNA, 20 bp, Influenza A virus
attgctccagaatatgcata

SEQ ID NO: 61536 - DNA, 20 bp, Influenza A virus
ctccagaatatgcatacaaa

SEQ ID NO: 61537 - DNA, 20 bp, Influenza A virus
tcaagaaaggggactcagca

SEQ ID NO: 61538 - DNA, 20 bp, Influenza A virus
tgaaaagtgaattggaatat

SEQ ID NO: 61539 - DNA, 20 bp, Influenza A virus
ggagctatagcaggttttat

SEQ ID NO: 61540 - DNA, 20 bp, Influenza A virus
gagctatagcaggttttata

SEQ ID NO: 61541 - DNA, 20 bp, Influenza A virus
tatagagggaggatggcagg

SEQ ID NO: 61542 - DNA, 20 bp, Influenza A virus
atagagggaggatggcaggg

SEQ ID NO: 61543 - DNA, 20 bp, Influenza A virus
tagagggaggatggcaggga

SEQ ID NO: 61544 - DNA, 20 bp, Influenza A virus
ctagatgtctggacttataa

SEQ ID NO: 61545 - DNA, 20 bp, Influenza A virus
taatgctgaacttctggttc

SEQ ID NO: 61546 - DNA, 20 bp, Influenza A virus
tggttctcatggaaaatgag

SEQ ID NO: 61547 - DNA, 20 bp, Influenza A virus
tcatggaaaatgagagaact

SEQ ID NO: 61548 - DNA, 20 bp, Influenza A virus
catgactcaaatgtcaagaa

SEQ ID NO: 61549 - DNA, 20 bp, Influenza A virus
agaagaagcaagactaaaca

SEQ ID NO: 61550 - DNA, 20 bp, Influenza A virus
gaatcaatgggaacttacca

SEQ ID NO: 61551 - DNA, 20 bp, Influenza A virus
ccaaatactgtcaatttatt

SEQ ID NO: 61552 - DNA, 20 bp, Influenza A virus
attcaacagtggcgagttcc

SEQ ID NO: 61553 - DNA, 20 bp, Influenza A virus
ttcaacagtggcgagttccc

SEQ ID NO: 61554 - DNA, 20 bp, Influenza A virus
cgaacagatggagactgatg

SEQ ID NO: 61555 - DNA, 20 bp, Influenza A virus
ttccgacggatgctctgatt

SEQ ID NO: 61556 - DNA, 20 bp, Influenza A virus
tccgacggatgctctgattt

SEQ ID NO: 61557 - DNA, 20 bp, Influenza A virus
ccgacggatgctctgatttc

SEQ ID NO: 61558 - DNA, 20 bp, Influenza A virus
cgacggatgctctgatttca

SEQ ID NO: 61559 - DNA, 20 bp, Influenza A virus
atgacaaagaagaaataagg

SEQ ID NO: 61560 - DNA, 20 bp, Influenza A virus
tgacaaagaagaaataaggc

SEQ ID NO: 61561 - DNA, 20 bp, Influenza A virus
gccttatttcttctttgtca

SEQ ID NO: 61562 - DNA, 20 bp, Influenza A virus
tttcttctttgtcataaagg

SEQ ID NO: 61563 - DNA, 20 bp, Influenza A virus
cttctttgtcataaaggatg

SEQ ID NO: 61564 - DNA, 20 bp, Influenza A virus
gaacaatggtgatggaattg

SEQ ID NO: 61565 - DNA, 20 bp, Influenza A virus
gtcaggatgatcaaacgtgg

SEQ ID NO: 61566 - DNA, 20 bp, Influenza A virus
tcacccctccagaagttccg

SEQ ID NO: 61567 - DNA, 20 bp, Influenza A virus
cgatcattgatcccacgttt

SEQ ID NO: 61568 - DNA, 20 bp, Influenza A virus
atcccacgtttgatcatcct

SEQ ID NO: 61569 - DNA, 20 bp, Influenza A virus
tgccgcatttgaagatctaa

SEQ ID NO: 61570 - DNA, 20 bp, Influenza A virus
gaagatctaagagtattgag

SEQ ID NO: 61571 - DNA, 20 bp, Influenza A virus
aagatctaagagtattgagc

SEQ ID NO: 61572 - DNA, 20 bp, Influenza A virus
agcttcatcaaagggacgaa

SEQ ID NO: 61573 - DNA, 20 bp, Influenza A virus
atcaaagggacgaaggtggt

SEQ ID NO: 61574 - DNA, 20 bp, Human papillomavirus type 101
gccctttagtgctacctgca

SEQ ID NO: 61575 - DNA, 20 bp, Human papillomavirus type 101
agtgctacctgcaaacttat

SEQ ID NO: 61576 - DNA, 20 bp, Human papillomavirus type 101
gtgctacctgcaaacttatt

SEQ ID NO: 61577 - DNA, 20 bp, Human papillomavirus type 101
ttatgtgatgaattagtaac

SEQ ID NO: 61578 - DNA, 20 bp, Human papillomavirus type 101
tgtgatgaattagtaaccga

SEQ ID NO: 61579 - DNA, 20 bp, Human papillomavirus type 101
gagcccaagactgcaacagt

SEQ ID NO: 61580 - DNA, 20 bp, Human papillomavirus type 101
agcccaagactgcaacagtt

SEQ ID NO: 61581 - DNA, 20 bp, Human papillomavirus type 101
cgtgtatcgtcccaaggatc

SEQ ID NO: 61582 - DNA, 20 bp, Human papillomavirus type 101
tactggatccttgggacgat

SEQ ID NO: 61583 - DNA, 20 bp, Human papillomavirus type 101
actggatccttgggacgata

SEQ ID NO: 61584 - DNA, 20 bp, Human papillomavirus type 101
tgaatacctgcaaattataa

SEQ ID NO: 61585 - DNA, 20 bp, Human papillomavirus type 101
taaatccaagcatggggacg

SEQ ID NO: 61586 - DNA, 20 bp, Human papillomavirus type 101
cagtaatgatgttgtttcag

SEQ ID NO: 61587 - DNA, 20 bp, Human papillomavirus type 101
tttcagttttatgctgcaaa

SEQ ID NO: 61588 - DNA, 20 bp, Human papillomavirus type 101
cagttttatgctgcaaaatg

SEQ ID NO: 61589 - DNA, 20 bp, Human papillomavirus type 101
gtaaatagcagaagccaatt

SEQ ID NO: 61590 - DNA, 20 bp, Human papillomavirus type 101
taaatagcagaagccaattt

SEQ ID NO: 61591 - DNA, 20 bp, Human papillomavirus type 101
tggttgcaaccactagtaga

SEQ ID NO: 61592 - DNA, 20 bp, Human papillomavirus type 101
ggttgcaaccactagtagat

SEQ ID NO: 61593 - DNA, 20 bp, Human papillomavirus type 101
gttgcaaccactagtagatg

SEQ ID NO: 61594 - DNA, 20 bp, Human papillomavirus type 101
gacctgggcgatccagacga

SEQ ID NO: 61595 - DNA, 20 bp, Human papillomavirus type 101
cgatgctgtgcaagacaggc

SEQ ID NO: 61596 - DNA, 20 bp, Human papillomavirus type 101
gatgctgtgcaagacaggct

SEQ ID NO: 61597 - DNA, 20 bp, Human papillomavirus type 101
ataaatccccagtagcctgt

SEQ ID NO: 61598 - DNA, 20 bp, Human papillomavirus type 101
cacagcatcgaaacggtcga

SEQ ID NO: 61599 - DNA, 20 bp, Human papillomavirus type 101
tggaccgctatttattacca

SEQ ID NO: 61600 - DNA, 20 bp, Human papillomavirus type 101
attaccaagacgcacaggac

SEQ ID NO: 61601 - DNA, 20 bp, Human papillomavirus type 101
ttaccaagacgcacaggaca

SEQ ID NO: 61602 - DNA, 20 bp, Human papillomavirus type 101
ccaagacgcacaggacaatt

SEQ ID NO: 61603 - DNA, 20 bp, Human papillomavirus type 101
taccaattgtcctgtgcgtc

SEQ ID NO: 61604 - DNA, 20 bp, Human papillomavirus type 101
atcagtggggcaaggacatc

SEQ ID NO: 61605 - DNA, 20 bp, Human papillomavirus type 101
gcgacttgcaagattacaag

SEQ ID NO: 61606 - DNA, 20 bp, Human papillomavirus type 101
caagattacaagacgaggct

SEQ ID NO: 61607 - DNA, 20 bp, Human papillomavirus type 101
caagacgaggctagggatcc

SEQ ID NO: 61608 - DNA, 20 bp, Human papillomavirus type 101
ttaaagggcctgcaaatact

SEQ ID NO: 61609 - DNA, 20 bp, Human papillomavirus type 101
cagtaacaagcacacggcat

SEQ ID NO: 61610 - DNA, 20 bp, Human papillomavirus type 101
agtaacaagcacacggcatg

SEQ ID NO: 61611 - DNA, 20 bp, Human papillomavirus type 101
atccttcttacatatcggta

SEQ ID NO: 61612 - DNA, 20 bp, Human papillomavirus type 101
ttacatatcggtatatggcc

SEQ ID NO: 61613 - DNA, 20 bp, Human papillomavirus type 101
catatcggtatatggccatc

SEQ ID NO: 61614 - DNA, 20 bp, Human papillomavirus type 101
gtcagcaatctggggtggcc

SEQ ID NO: 61615 - DNA, 20 bp, Human papillomavirus type 101
ttgatggcttagcatctgct

SEQ ID NO: 61616 - DNA, 20 bp, Human papillomavirus type 101
atggcttagcatctgctaac

SEQ ID NO: 61617 - DNA, 20 bp, Human papillomavirus type 101
gcatctgctaacattaatgg

SEQ ID NO: 61618 - DNA, 20 bp, Human papillomavirus type 101
atggcagtgctgaaacatct

SEQ ID NO: 61619 - DNA, 20 bp, Human papillomavirus type 101
ccagatgtgtctgaacctcc

SEQ ID NO: 61620 - DNA, 20 bp, Human papillomavirus type 101
cagatgtgtctgaacctcct

SEQ ID NO: 61621 - DNA, 20 bp, Human papillomavirus type 101
ttgtggatggttttgatgca

SEQ ID NO: 61622 - DNA, 20 bp, Human papillomavirus type 101
tggatggttttgatgcattt

SEQ ID NO: 61623 - DNA, 20 bp, Human papillomavirus type 101
tgatgcatttgatacatttt

SEQ ID NO: 61624 - DNA, 20 bp, Human papillomavirus type 101
ctatggatcctaaacaaaca

SEQ ID NO: 61625 - DNA, 20 bp, Human papillomavirus type 101
tatggatcctaaacaaacac

SEQ ID NO: 61626 - DNA, 20 bp, Human papillomavirus type 101
tttgttgttggttgcacccc

SEQ ID NO: 61627 - DNA, 20 bp, Human papillomavirus type 101
gttgttggttgcaccccttg

SEQ ID NO: 61628 - DNA, 20 bp, Human papillomavirus type 101
ttgttggttgcaccccttgt

SEQ ID NO: 61629 - DNA, 20 bp, Human papillomavirus type 101
tattggtgctgagcaaggcc

SEQ ID NO: 61630 - DNA, 20 bp, Human papillomavirus type 101
attggtgctgagcaaggcca

SEQ ID NO: 61631 - DNA, 20 bp, Human papillomavirus type 101
ttggtgctgagcaaggccag

SEQ ID NO: 61632 - DNA, 20 bp, Human papillomavirus type 101
gtgctgagcaaggccaggac

SEQ ID NO: 61633 - DNA, 20 bp, Human papillomavirus type 101
atattttgctacacctagtg

SEQ ID NO: 61634 - DNA, 20 bp, Human papillomavirus type 101
ctacaatgtgtcccacagca

SEQ ID NO: 61635 - DNA, 20 bp, Human papillomavirus type 101
ttgggtggttgatttatcag

SEQ ID NO: 61636 - DNA, 20 bp, Human papillomavirus type 101
tgggtggttgatttatcaga

SEQ ID NO: 61637 - DNA, 20 bp, Human papillomavirus type 101
gggtggttgatttatcagac

SEQ ID NO: 61638 - DNA, 20 bp, Human papillomavirus type 101
ggtggttgatttatcagaca

SEQ ID NO: 61639 - DNA, 20 bp, Human papillomavirus type 101
ctggtacatttgctgccaat

SEQ ID NO: 61640 - DNA, 20 bp, Human papillomavirus type 101
gctgccaattttgccagcag

SEQ ID NO: 61641 - DNA, 20 bp, Human papillomavirus type 101
ctgccaattttgccagcagg

SEQ ID NO: 61642 - DNA, 20 bp, Human papillomavirus type 101
tgccagcaggtatgttcatg

SEQ ID NO: 61643 - DNA, 20 bp, Human papillomavirus type 101
gccagcaggtatgttcatgt

SEQ ID NO: 61644 - protein, 1442 aa, Unknown
  Microbial Source - Accession No. Ga0109381_1004188
MANQAAVTQRAYTLRLRGVDPQDQSWRDALWATHEAVNKGAKAFGDWLLTLRGGLDHALADAKVKGGKRKPDRDPTDEERKGRRILLALSWLSVESEKGAPDRHVVPHDLNKQSGSRSWKTVDALREILKGRGLDESEIESWVQDCSASLSAAIRDDAVWVNRSKAFDDAVKSIDCSLTRDEVWDMLDRFLGSRDAYLAPAKGAEDESAEAEQEDKAKDLVQKAGQWLSSRFGTGKGADFSRMAAVYEKIADWAGKARAGMTGDAAVAGLAAALSEFSPASNDLQGVFRLISGPGYKSATRKLLKQLPARPSVAQEDLENLRDSACDDAEKCKANTGSKRQRAYADAILKDVESVCGFTYLQEGGPARHSEFAVMLDHAARRVSLAHTWIKRAEAERRRFEEDARRMDKLPARVKQWLDAFCFERSERLKASGEKKTYRIRRRAVDGWKELVAAWSNADCKTAEDRIAAARALQDDPEIEKFGDIQLFEALADDEALCVWHKDGDLAKSPDPQPLIDYVLATDAEFKKRQFKVPAYRHPDALLHPVFCDFGNSRWDISFDVHKAVKTSERNRKNMMAQDPHALSMTLWTGSTVEPQRLRWQSKRLARDLALKGRQDANARPVTRADRLGRAAAGVFAHSAVRIAGIFAQEDWNGRLQAPRAQLDAIAARVARHGWDAKARQMRDHLRWLITFSAKLQLSGPWAGPEPSPWVEYTKTFPDDAPAKPFVSRKGDYAVRHQGNDARNGHAKLILSRLPGLRVLSVDLGHRYAAACAVWETLSAEQLKAACQAAGHEPPKDSDLYLYLKKKVKKQKKGKALEVEETTVYRRIGADVLPDGKPHPAPWARLDRQFLIKLQGEDTEARKASSAEVGAVQELERAVGREPPDQRSLRVDDLMSETVRTVRLALQRHGRRARIAFNLTASKRHLPDGREEVLTAEERVKLLADTLADWYALFTGKGWHDEWARQQWETHIAPLLQGSVLPQIPEDAEDVPKARRKYQDDLMERLSPLARSLAGNDSLCRKLHCLWATRWRENDVILRKRLRWLRDWILPRGRNAEGDPAIRHVGGLSLTRIATIKSLYQVQKAFHMRSEPEDPSRNNPSKGDDALLDFGRSILDVMEHMREQRVKQLASRIAEAALGIGRVKRLAGGKDPKRPRQRVDRPCHAVVIENLTHYRPEETRTRRENRQLMSWSSSKVSKYLAEACQLHGLHLREVQAGYTSRQDSRTGAPGVRCQDVPVSEFMQSPFWRKQVAQAEKKRAEGKGDARERFLCDLNEKWKGQPEADWKRAAAVRVPLKGGEIFVSADEKSPAAKGLQADLNAAANIGLRALTDPDWPGKWWYVPCDPTNFKPAKDKVAGSAAICLDKPLKNAPAAQDTDGPRKKRGKAEARSREVVNLWRDVSSQPISANDDWREFTPYWNEVQARVVNILRQSAGFARDQGER

SEQ ID NO: 61645 - protein, 1285 aa, Unknown
  Microbial Source - Accession No. Ga0212093_1006934
MEEKMLKSYDYFTKLYSLQKTLRFELKPIGKTLEHIKNSGIIESDETLEEQYAIVKNIIDKLHRKHIDEALSLVDFTKHLDTLKTFQELYLKRGKTDKEKEELEKLSADLRKLIVSYLKGNVKEKTQHNLNPIKERFEILFGKELFTNEEFFLLAENEKEKKAIQAFKGFTTYFKGFQENRKNMYSEEGNSTSIAYRIINENLPLFIENIARFQKVMSTIEKTTIKKLEQNLKTELKKHNLPGIFTIEYFNNVLTQEGISRYNTIIGGKTTHEGVKIQGLNEIINLYNQQSKDVKLPILKPLHKQILSEEYSTSFKIKAFENDNEVLKAIDTFWNEHIEKSIHPVTGNKFNILSKIENLCDQLQKYKDKDLEKLFIERKNLSTVSHQVYGQWNIIRDALRMHLEMNNKNIKEKDIDKYLDNDAFSWKEIKDSIKIYKEHVEDAKELNENGIIKYFSAMSINEEDDEKEYSISLIKNINEKYNNVKSILQEDRTGKSDLHQDKEKVGIIKEFLDSLKQLQWFLRLLYVTVPLDEKDYEFYNELEVYYEALLPLNSLYNKVRNYMTRKPYSVEKFKLNFNSPTLLDGWDKNKETANLSIILRKNGKYYLGIMNKENNTIFEYYPGTKSNDYYEKMIYKLLPGPNKMLPKVFFSKKGLEYYNPPKEILNIYEKGEFKKDKSGNFKKESLHTLIDFYKEAIAKNEDWEVFNFKFKNTKEYEDISQFYRDVEEQGYLITFEKVDANYVDKLVKEGKLYLFQIYNKDFSENKKSKGNPNLHTIYWKGLYDSENLKNVVYKLNGEAEVFYRKKSIDYPEEIYNHGHHKEELLGKFNYPIIKDRRYTQDKFLFHVPITMNFISKEEKRVNQLACEYLSATKEDVHIIGIDRGERHLLYLSLIDKEGNIKKQLSLNTIKNENYDKEIDYRVKLDEKEKKRDEARKNWDVIENIKELKEGYMSQVIHIIAKMMVEEKAILIMEDLNIGFKRGRFKVEKQVYQKFEKMLIDKLNYLVFKNKNPLEPGGSLNAYQLTSKFDSFKKLGKQSGFIFYVPSAYTSKIDPTTGFYNFIQVDVPNLEKGKEFFSKFEKIIYNTKEDYFEFHCKYGKFVSEPKNKDNDRKTKESLTYYNAIKDTVWVVCSTNHERYKIVRNKAGYYESHPVDVTKNLKDIFSQANINYNEGKDIKPIIIESNNAKLLKSIAEQLKLILAMRYNNGKHGDDEKDYILSPVKNKQGKFFCTLDGNQTLPINADANGAYNIALKGLLLIEKIKKQQGKIKDLYISNLEWFMFMMSR

SEQ ID NO: 61646 - protein, 1273 aa, Unknown
  Microbial Source - Accession No. GA0212092_1000015
MQDKTGWSSFTNKYSLSKTLRFELKPVGNTQKMLEDDGVFQKDRERQENYKKVKPFMDKLHREFIKEALNNLKLEGLTEYFEIFKKFRKDKNNKELKNAEKKLRQIIGRCYTETAQIWVEKYKEFGFKKKNIGFLFEEGVFELMKLKYGNDEASQIEKNGEVLSIFDGWKGFLGYFKKFFETRNNFYKDDGTSTAVSTRIINENLKIYLDNLIKYNKIKDKVDFKEADILQENKLNLSDFFNVESYAKYSLQKGIDYYNEILGGKTLKNGTKLKGLNEVINEYKQKNKSGELSKFKMLKKQILGEGEDRTLFEEIENEDELKDVLKDFFYNADPKITLFKTLLEDFFSNTEKYKDELDKIYFNTVAINGILHRWVDDSGVFQKYLFEVLKSNKLVKSNHYDKKEDSYKFPDFISFEHIKVALENCERDGLKDKFWKEKYYTKECLTENGLANLWQEFLEIYKCEFKKLYDYKTDDNDCYLQYRDNYKKYILDANFNPKEKSAKDIIKDYLDSVLSIYQLAKYFALEKKKVWTTDYETGDFYYEYIKFYEDTYEQIIKPYNLVRNYLTRKPINTAKKWKLNFDNAYLASGWDKDKEVSNLTVILRRDEQYYLAIMKKGKNKIFEKKFSCGEFEKMEYKQIAEASSDIHNLVLMNDGSCRRCIKMHDKRKYWPLDISIIKEKKSYAKENFVRRDFERFVNYMKKCSLLYWKEYDLKFSDTSTYKNINDFTNEIASQGYKLSFSAIPESYINEKNNNGELYLFQIYNKDFGIKTEGNKNLHTMYWESIFSEENRFRNFIVKLNGKAEIFYRPKSEQVEKEQRNFTREIIKNRRYTENKIYFHCPITLNRISRENVKKFNNGINNYIATNPNINILGVDRGEKHLVYYAIVDQDGKLIDAEDATGSFNTIGSTDYHRLLEEKAKDREKERKDWDLIRGIKDLKKGYISLVVRKIADLAIKYNAIIIFEDLNTRFKQIRGGMEKSVYQQLEKALINKLSFLVNKGEKDPEQAGHLLKAYQLAAPFQTFDKMGRQTGIIFYTQASYTSKIDPITGWRPNLYLKYRNIDDSKESIKKFKSILFNKEKNRFEFTYDLKDFVDFEEDKIPEKTEWTLCSSVERHKWNRHMNNNKGGYEVYKDLTENFYKLFDENNISMNKDIVDQVESISNGNFFRQFIYLFNLVCQIRNTDEKAEDVDKRDFILSPVEPFFDSRRAKDFKAYGDNLPKNGDENGAYNIARKGVLIIKKIKEYYNQNGSCDKLGWGDLSISHKEWDDFATNN

SEQ ID NO: 61647 - protein, 488 aa, Unknown
  Microbial Source - Accession No. GA0117933_1071983
VSVFLTAKLKVHNPSRRKRAVLDHALEEYTRAYAWLLGWAKDNLPLLEKKGQYRGRFTETAIRKALPPASAFNTYDLHSSARDSLLVDVAGALCSYFRLRDENPLTAFPTCRDPRPETYPDALEEFASVADDERDYNERRDRLSKVARGAVMPVYFARPDGVPRGRNFSLLCDPAARRYYAIVFLLPGRGGGALHGRGNLARMGWPQGHDAGEPPPRFHGKPSGALVLPLALGRWHAETFLDPCLRGEANVRSAFLSRADVDGRDADYYVHVTFEFSPPTIETETFLGVDRGISNLIALTVTDGEGRVLHQELHPGDDLVSFQKYVFTEYRRRQRRGRTLRGERVIARANEEVCHRLANVIADVAVRHRSQVVMERLKGFKEQRRDFGLLKRAPLQRIEQILEYKLPVRGLPPPRTVNPAYTSRECPRCGYGRDVRGKGINRPSQAQFRCERCGYETHADLNGSHNIARRWIDIRARPKLAASTLTTA

SEQ ID NO: 61648 - protein, 1059 aa, Unknown
  Microbial Source - Accession No. GA0212092_1024084
MADGKPPTFPRTYTMRLCPPDEGQADRNGLWDKLFATHYAVNAGARAFGEFLLDMRGGLSPDLSRMGLDRIKDDAKRRLALAGRRRMLALGWLSVEDDHGAGDHPHALPESSGQPLPRDVAEKLLRQILETKGVTDRATVDEWCDDCLGALTAAVRDDTVWVNRAESYRNLDSGPSPDQAFKILERLLGKNFLDLSLGKETRTRDRHRGQLGTDEGEDGEDKEEWRTTAASGNDPSENARQLICDLFGTGQKGDFRKTAGFAAKVKNWVNSLGDYKNCDQPSLENRIRETFRSVFSGGEYPSFPSKELKKSRPKPTSLYPQECVSGKKPGKLARRVRKLLVYLKVWDQMPGVEDGTIRDNRLHALVNEIDSACDEEIKKDRTDLKAPSWAPALLSRLEKASGIKLASRQQGSPSAGEFRILFAVLAARRLSQTQSWTRLNEMTRHEAQSDLDSAKSEIDRLDPKGKARGLLERWEDRRRQESGTRGEYRITRAAISALDDVLEAWATSTGPEERIGLLPEVQSRAEKFGDASFFEWLARTDNECLWKHASTGAISGEIITNWVKKREAEAAISLVKVPRYCHPDPFLHPVWCEFGNSKPDVRYFLRNELGQTNKRRKNSQHSEDLRNVELLLVNDRSGTVGMERLRWASDRLWKDLGVAATQSSDALARNDRLSRAALGLSTGSYRPIYPFTGQAKKWNARLQVDRNALEELRGLWDNRTRKWTDEGRRAHQVRWFLSFSPDLKASAGPWHRFVENNRDILNDLSTRPYKDKKTDELRVPLPWGKLNRKENRKGRAQLVLCRLPGLRVLSVDLGHRHAAACAVWETLSTAQINQLCYQHHQPPPGPSSLYHVYETSIPDTDGCTGEVRKLKRLKPKQFIYRRIGPDRVNGREHPAPWARLVRQFVIPLQGEKDEPRWPTEEEKRLAHTLRLTLELPESKVERPVRFDELMSGIIDMLERGIDRHKKASRVAYNLTAREIVEPGGKLVPVDGTDRYEVISSALKDWYSLASSPGLYSNFAREIWNAKCAGLKGGRPVPAETAADEPEKVSFSDLAKGLAE

SEQ ID NO: 61649 - protein, 1620 aa, Unknown
  Microbial Source - Accession No. GA0212093_1001507
MAPSRAKNSWSSKKANPSKPAARSSHTAKPRWPYWKSQAWKTNTPSAKWSRKKKARNSPRKCTSNRPLRRELIILESAVKIAQRWRLCSRNQECVICQRDKCLVVKENMSKNNDCMKCAALMLQKAREELACLITESERTTMSQQVKPPVTQRAYTLRLRGIDPSDTSWRKALWQTHEGVNKGAKAFGDWLLTLRGGLDHTLADTKVKGGKGKPDRDPTDEERKARRILLALSWLSVESKLGAPVGFIIASGTEAAEDRNRKVVAALEEILKSRNVATNEIDQWKNDCSASLSAAIRDDAVWVNRSKAFDEAVKSIGSSLTREEAWDMLERFFGSRDAYLAPAKGSEDESSETEQEDKAKDLVQKAGQWLSSRFGTGKGADFCRMANVYGKIAAWADNAQADTTGNDAINNLAAALNEYSPEPNDLKGVLGLISGPGYKSATRNLLNQLAAKATVTQQDFVSLKDKASNDAQKCKQNTGSKGPRPYSDAILKNVESVCGFTYLQDGGPARHSEFAVILDHAARRVSLAHTWIKRAEAERRKFEEDAKKIDQVPKAAKDWLDSFCLERSGASGALEPYRIRRRAVDGWKEVVAAWSKADCKTAEDRIAAARALQDDPEIDKFGDIQLFEALAEDDAVCVWHKDGDAAKPPDPQPLIDYALAAEAEFKKRHFKVPAYRHPDALLHPVFCDFGNSRWDICFDVHKNVQTPFPRALSLTLWTGSGMVSVPLCWQSKRLARDLALGQNAQNDGSSEVTRADRLGRAASNVTKSDEVKISGLFEQEDWNGRLQAPRQQLEAIAAVRDNLSLSDQERERRMSGMIDRIRWLVTFSAKLQPQGPWCEFAEKIQIGINPQYWPHADTNKDRKGHARLILSRLPGLRVLSVDLGHRYAAACAVWEAVNAEQINVACRAAGHREPKASDLYLHLKRKTTKQKKGDQVEFKETTIYRRIGADTLPDGTPHPAPWARLDRQFLIKLQGEEEGVRAASNEEIWAVHRLEVELGRTAPLIDRLVKAGWGQSGKQKTRLDALRNLGWAPANEVQGSDEMDEGEVHKPSLSVDELMSSAVRTMRLALKRHGDRARIAFAMTAAYKPMPGDRKYYFTEAKDASANEDATARNGKHIEFIQDALLLWYGLTSSRGWRDDAARQLWDDHIAKLSVYKAPEEIGEDASGVERKTKQKENREKLHDVAKALAQDVNLRKVLHNAWKKRWEKDDERWKKQLRWFKDWVFPRGKHASDPAIRKVGGLSLPRLATLIEFRRKVQVGFFTRLQPDGTRAETKEQFGQSALDTLEHLREQRVKQLASRIVEAALGIGRVRRPLGGKDPKRPDVRVDEPCHAIVIEDLTHYRPEETRTRRENRQLMTWSSSKVKDYLSEACQLHGLHLREVSASYTSRQDSRTGSPGIRCQDVPVKEFMRSPFWRKQVAQAEKKGDAHERFLCELNAMWKDKTVADWEKAGAVRVPLKGGEVFVSADRISPSAKGLQADLNAAANIGLRALTDPDWPGKWWYVPCEPASFRPAKDKVDGSAVVNPGQPLRQSAQAQSGDAAKDKKKRGNKGAGQSKEVVNLWRDISSSPLECIECGEWKEYAAYQNEVQYRVIRILEEQIKGRDRQPHEGSREDDIPF

SEQ ID NO: 61650 - protein, 377 aa, Unknown
  Microbial Source - Accession No. GA0212120_1000874
MAEGTEEVKLTVKAVILARDAGVKVLREEYNTYRKVLLSRVKEAVRTVVKDPELRVYAQQKWMVDKKLTEYLKNLPMHPMPFHRQSVWIERKDQGFYIHFKVKREGGEAVCYLLVPEKYRDLIAKACGKDNPMLGEVELIEDRKYGRFNVHLTLRLPKPEPYEPKGWLGVDVGWNKLATSILATCNPHLKFSNPTFHGKEFKTSIIQLRHMLKEAQRKGEAVRKWDSRLKNTIKYAVGAVAKEIVEKAKRLKAGVAMERLTFKSTSKGYLVPRYKLMIAVKTLCEREGVPFKLVPAQYTSVTCPKCGYRDERNRSNEWFKCLKCGYQTDADLAGAMNIALRAFDRRPDGGRNAVGYTPTAKSLLDYTSGRLGQPSSP

SEQ ID NO: 61651 - protein, 426 aa, Unknown
  Microbial Source - Accession No. GA0212125_1004414
MRRTIPILLPNDSDLVATIKLFTQIANEVSEMAFKLDKVKRWTLRRQFYSLLRQKYPTVNSRVLEYVLRVVTGCYTAKKRRKMKSKEPVRFKQEFALFDKRLFSFNGDCVTIWTIAGRKEFPFKLPPVSRFMELWERKEDIDSMVLKVRDGRVVAHVCLTIPDPPLRQFTYMVGVDLGAEYPLIAVRSDGVIFCPDYSVFHQKRKLFMQRRRELQKKLAEKRKYGENARSVVRRLKALSHKQRRFTKQFVRWVVKRFVDWAKDALIVMEKLRLPQGRKKKRAKALNRTLSLMPYGMVRKTIEEICEEQGLQVIFVPPAGTSQTCPACGQKGERPKRDLFVCPHCGYSEHADIVGARNVLRRGFEMLLRDGAEAGDKPAGLCQPCSSLPADEAGGGNPTVVPERVKGLQSTSKAKSATEGRLQPSLF

SEQ ID NO: 61652 - protein, 285 aa, Unknown
  Microbial Source - Accession No. GA 0212125_1006348
LHVPAKYHDLIEKACGKDNPVLGQVELVEDKKYGWVNCHITLRLPKPEPYEPLGWVGVDIGWNKLATSIACTCNPHIRFFNPTFHGKEFKTRIIQLRHLLKEYARKGKAWKKWDYRLKHTIKYAVGVVAKEIVTKAKKLKAGVAMESLTFKSTTKGYIVPRHKLMVAVKTLCEREGIPFKLVPAQYTSITCPKCGHINSKNRDGEWFKCLKCEYQTDADLVGAMNIALRALDSCPNGGQIDVGHAPRLKPMGLYAPEGGDVATPLRGMNDDLYKATRKTEKIEER

SEQ ID NO: 61653 - protein, 486 aa, Hydrogenivirga sp.
MNKVLKLTAKREKVKFKLLLLETGREEEVKFYELREALERFVRGVRVAYLKTLPDSLEGLEEKGRPNTRAVNSNELSKRFPPECAKVKLGSLELELGKDNIASSIRYTIEKDIRENLKREFKTIAIKSVPIIARVHTTKSHPYEKAFGEVFRIFEISEPDEKNRVSVRVGVKFFKQVEVEGKKATPVLVVEAVMRLKGRDYATANSYYNILKRIKEGEYKVAYAGLSYREGSGISLLLSYNLPDISEDDKRENILGIDLGQACPVYWSLITPELEKKKLTNGRHPRGQIEYPVNLEGAIRKLWRAKRNLLSSLRRIEEQTSLLSEGNRDLKGRLLRRKREVERSLKGMRRKEKNLMKKMDEFLANEVIRVALRERCRKIRMERLDGVDKTELYFPKWNYGQLQNLIEQRASLYGIEVERVNPRKTSQRCPSCGYVGQRREEVRPTRDLFRCPECGEESFADFVGAFNVGIGGWEAFKPKEALSSSS

SEQ ID NO: 61654 - protein, 376 aa, Rhodothermus marinus
MRTTFKYRLYRSKRDKHLIEQIEVAASIWNHSVALTRRYYRIYGKYPGANRLMKHIARLRRRNPYWQKLGSQAVQDVIQRLDRAYWRFFSDPKAGRPRFKKRERYSSFTLKQAGWKYPGGNRIRIGKHNYKFVLSRPIQGEIKTVTIKRDRVGRLWICFSVVTEEQPKPPAPHEAVMRPVGLDFGLKCFLTLSDGTKIQSPEFFRRGLQEVRKAHRALSRKQRGSNNYRKARVRLAKVYDRISNQRRDWFFKTAHALCERYDFIALEDLNIEGMKRRWGRKVSDLGFGEFVSILEHVARKRGVRVAKVARFFPSSRRCSCCGWVKENLSLADREWTCERCGTVHDRDENAAINICREGASSLGVGDVRPPEAAVAV

SEQ ID NO: 61655 - protein, 461 aa, Microcystis sp.
  misc_feature (35)..(37): Xaa can be any naturally occurring amino acid
  MISC_FEATURE (38)..(247): X = any amino acid
MMKLVQKHLIKFNHKNYSVIDKLGFLSKNLYNCAXXXXXXXXXXXXXXXXXXXXXXXXXXXXXXXXXXXXXXXXXXXXXXXXXXXXXXXXXXXXXXXXXXXXXXXXXXXXXXXXXXXXXXXXXXXXXXXXXXXXXXXXXXXXXXXXXXXXXXXXXXXXXXXXXXXXXXXXXXXXXXXXXXXXXXXXXXXXXXXXXXXXKVLEVRIIPKLGAYCLEIVYEQPSSSSQEGERYAFIDLGLNNLAAVTSNIPEFQPTLVCGKALKSCNQKYNKTLAKLKSELPSLQKTSKRIQGLTLKRNCQVDYYLHTASKYIIDKLLAHQINLLVIGHNQGWKQNINIGDRNNQSFVNIPHSRLIEQLTYKANLVGIEVKTTNESYTSKCSFLDLESIQKQKSYLGKRIKRGLFRSSSGYFYGADINGSLNIGRKVVGEAAFSGNPIERFVVNPVRVKAYKANSRCNICVQN

SEQ ID NO: 61656 - protein, 1271 aa, Leptospira sp.
MKNLANFTNLYSLQKTLRFELKPIGKTLDWIIKKDLLKQDEILAEDYKIVKKIIDRYHKDFIDLAFESAYLQKKSSDSFTAIMEASIQSYSELYFIKEKSDRDKKAMEEISGIMRKEIVECFTGKYSEVVKKKFGNLFKKELIKEDLLNFCEPDELPIIQKFADFTTYFTGFHENRENMYSNEEKATAIANRLIRENLPRYLDNLRIIRSIQGRYKDFGWKDLESNLKRIDKNLQYSDFLTENGFVYTFSQKGIDRYNLILGGQSVESGEKIQGLNELINLYRQKNQLDRRQLPNLKELYKQILSDRTRHSFVPEKFSSDKALLRSLLDFHKEVIQNKNLFEEKQVSLLQAIRETLTDLKSFDLDRIYLTNDTSLTQISNFVFGDWSKVKTILAIYFDENIANPKDRQRQSNSYLKAKENWLKKNYYSIHELNEAISVYGKHSDEELPNTKIEDYFSGLQTKDETKKPIDVLDAIVSKYADLESLLTKEYPEDKNLKSDKGSIEKIKNYLDSIKLLQNFLKPLKPKKVQDEKDLGFYNDLELYLESLESANSLYNKVRNYLTGKEYSDEKIKLNFKNSTLLDGWDENKETSNLSVIFRDTNNYYLGILDKQNNRIFESIPEIQSGEETIQKMVYKLLPGANNMLPKVFFSEKGLLKFNPSDEITSLYSEGRFKKGDKFSINSLHTLIDFYKKSLAVHEDWSVFNFKFDETSHYEDISQFYRQVESQGYKITFKPISKKYIDTLVEDGKLYLFQIYNKDFSQNKKGGGKPNLHTIYFKSLFEKENLKDVIVKLNGQAEVFFRKKSIHYDENITRYGHHSELLKGRFSYPILKDKRFTEDKFQFHFPITLNFKSGEIKQFNARVNSYLKHNKDVKIIGIDRGERHLLYLSLIDQDGKILRQESLNLIKNDQNFKAINYQEKLHKKEIERDQARKSWGSIENIKELKEGYLSQVVHTISKLMVEHNAIVVLEDLNFGFKRGRQKVERQVYQKFEKMLIEKLNFLVFKDKEMDEPGGILKAYQLTDNFVSFEKMGKQTGFVFYVPAWNTSKIDPKTGFVNFLHLNYENVNQAKELIGKFDQIRYNQDRDWFEFQVTTDQFFTKENAPDTRTWIICSTPTKRFYSKRTVNGSVSTIEIDVNQKLKELFNDCNYQDGEDLVDRILEKDSKDFFSKLIAYLRILTSLRQNNGEQGFEERDFILSPVVGSDGKFFNSLDASSQEPKDADANGAYHIALKGLMNLHVINETDDESLGKPSWKISNKDWLNFVWQRPSLKA

SEQ ID NO: 61657 - protein, 424 aa, Parageobacillus thermoglucosidasius
MKYTKVMRYQIIKPLNAEWDELGMVLRDIQKETRAALNKTIQLCWEYQGFSADYKQIHGQYPKLKDVLGYTSMHGYAYDRLKNEFSKIASSNLSQTIKRAVDKWNSDLKEILRGDRSIPNFRKDCPIDIVKQSTKIQKCNDGYVLSLGLINREYKNELGRKNGVFDVLIKANDKTQQTILERIINGDYTYTASQIINHKNKWFINLTYQFETKETALDPNNVMGVDLGIVYPVYIAFNNSLHRYHIKGGEIERFRRQVEKRKRELLNQGKYCGDGRKGHGYATRTKSIESISDKIARFRDTCNHKYSRFIVDMALKHKCGIIQMEDLTGISKESTFLKNWTYYDLQQKIEYKAREAGIQVIKIEPQYTSQRCSKCGYIDKENRQEQATFKCIECGFETNADYNAARNIAIPNIDKIIRKTLKMQ

SEQ ID NO: 61658 - protein, 464 aa, Synechococcus sp
LSGATTSSLQVRIAAQQPAGTADAPGKNVRAKSALNKAILDQGWYEFRCMLEYKLAWKGGRLIVVPPQNTSRTCPCCGHVSSDNRQTQAWFECVACGYENNAFRGSGPEAFRGSGPEAFLVGAINILARGIQLLRDEGQDTTDAAVGMRVGEPPVSARMACGSNCTGGRKQEPAETTAQGAIHAQRGRNLRPSGRGGCQHSLPSGSAQVRIKKQRSHPQAHFCLPVNPVRTLSATKAAFFSAYPRPINAVYRRVVEELLVELHLTTVNSTFVYDPFFALGLVTLYDGLMEAYHPPEQREAIFNALCKALHLKPEVLRKNARDLLELMGSGDPRQRLDLLCLKPEAEDVGGLKAILERMTQPPYAYSRVLAVGLYTAYEVVAKSLYEEPEERTRRFLENVVSKLPFSTERVRKDLELYRSSLDRMKQARAVVEEMVKAARRQQERRQSAASLPETSLGDPSKPGS

SEQ ID NO: 61659 - protein, 543 aa, Sulfurihydrogenibium azorense
MVNKNLKITSGRDNVEFYLIVDGEEIPLKKQDIRNLITEFLKDVRLAYIKFLPNIELIQTGKYFTVNINSKRLTNENLSNSLTKLIPKNYIELEINGSKVKLDYKKDYVATSILYSVAKDITGNLKEGKTVVIKNLQYLARIKPDKNTPYDKAFSQVIKEFEIVENGKTVECVITFSAFKNASIKVKFKMNLRKKNFAVNNSYYQILNRIKNQEYKVAYIGIGYREKKGAFLLISYKFEKQPETSQEQEKVMGVDLGQVYLIYYSITNSHSRGDISLSYSWKDKIIGIWNRKKHLQKSLMEIRNLKKQGINDESIEKRYEKIVKELNSVREYEKNFMETLNKQIATKLIDIAVKEKVKTIVLEDLSLSNEEKNSLAFPKWNYYQLQSFIENKAQENGIQVKKINPAYTSQRCPSCGFIAFYKEMVRPKREKFTCPVCGFSSNADYVASLNIAEENIEEKIKARLISDIEKIEKVDKNNKVFTLFAIRNRIVKDLLKEFFNTNNGSSKKLLKRLEISNKEAYNTLIRDLKQFKVEYLDKRISNV

SEQ ID NO: 61660 - protein, 312 aa, Microcystis panniformis
MTELHHALKMSPDYQALPAKVSQLVLKQVEKTFKSYQKAKEQYKKSPDKFTGEPKLPRYKDKEKGRNVLTYNYQAISKKALKQGLIKLSGTNLEFKTNLKKVLEVRIIPKLGAYCLEIVYEQPSSSSQEGERYAFIDLGLNNLAAVTSNIPEFQPTLVCGKALKSCNQKYNKTLAKLKSELPSLQKTSKRIQGLTLKRNCQVDYYLHTASKYIIDKLLAHQINLLVIGHNQGWKQNLNIGDRNNQSFVNIPHSRFIEQLTYKANLVGIEVKTTNESYTSKCSFLDLESIQKQKSYLGKRIKRGLFRSSSGYF

SEQ ID NO: 61661 - protein, 377 aa, Rhodothermaceae bacterium
MEARRTYKYRLYRSKRDKHLVRQIEIASEIWNWGVALTRRYYSIYGKHLGYYRLKRQLAKRKKRDMGRWYGLNSQAGQNVIERLDKSYQRFFSDPKAGRPGFKKRTKYPSFTLTQTGWKLPEGQHSNRLRIGKHNFKFVLSRPIEGEVKTVTIKRDRSGDLWVCFSVAQDARPSMPQTGSAVGVDFGLKDFLVLSDGQTVESPQHLRASLKEMARLQRDLSRKKKGSNNREKARRRVAKLHRRIADQRRDFHFKAARAVLERHDFIAIEDLNLDGMKRLWGRKVSDLGFYSFVEILEHLATRNGKRVVKVDRYFASSKTCHDCGWVNKDLTLADREWVCKGCGCVQQRDLNAAKNIRDRALSHVVGDVRPAGRAVAA

SEQ ID NO: 61662 - protein, 548 aa, Elizabethkingia sp.
IFYFQDLFFKINWKQGFVKEGLNKEEANTAILLKKDDLFYLGIMDKNHNKIFRNIPKIKSEKTFSKINYKLLPGASKMLPKVFFSAKSIGYYEPNKEIINIRNHSSHTKGGKPQDGFEKIDFNVQDCRKMIDFFKSSIEKHPEWKNFGFQFSDTQSYNTIDEFYKEIEAQGYNISYSDIPESYINQLVDEGKLYLFQIYNKDFSPYSKGTPNMHTLYWKALFTEENLSNVIYKLNGQAEIFYREKSIDDENIIVHKAKEAIGNKNPNAIKKQSTFEYDLVKDKRYTVDKFQFHVPISLNFKANGSNFINQEVLSFLKNNPDVNIIGIDRGERHLIYLSLINQKGEILSQESFNTIKDEHHEIETPYHQLLSIKEKERDEARKNWGTIENIKELKEGYLSQVVHKIAKMMVDHNTIILLEDLNFGFKRGRFKVEKQVYQKLEKMLIDKLNYLVFKDKKNPFEPGGLYNALQLTNKFTSFKDLGKQSGFLFYVPAWNTSKIDPTTGFVNLFNTKYESIEKAKKFFNNFQSILFNKKENHFEFTFNYNDFT

SEQ ID NO: 61663 - protein, 1442 aa, Syntrophaceae bacterium
  misc_feature (816)..(824): Xaa can be any naturally occurring amino acid
MPRQDKPPVTQRAYTLRLRGADPNDKSWRDALWWTHEAVNKGAKAFGDWLLTLRGGLDHALVTTKVKVGKGKPDRDPTDEERKARRILLALSWLSVESKLGAPAGFIIASGQEAAAARNGKVIAALEEILTSRNVAKNEIGDWKNDCSASLSAAIRDDAVWVNRSKAFDEAVKSVGCSLTREEAWDMLERFFGSREAYLAPVKGSEDESSETEQEEKAKDLVQKAGQWLSSRFGTGKGADFSRMAKVYQKIADWAAACSPNKTGTDAIACLAASLSEFNPASNDLQGVLDLISGPGYKSATRNLLTQIAAKATVTQEDLTKLNETAAADKGKCETNTGSKGQRPYSDAILKNVESVCGFTYLQDGGPARHSEYAVILDHAARRVSLSHTWIKRAEAERRKFEEDAKKIDQVPNAAKDWLDQFCLERSGVSGALEPYRIRRRAVDGWKEVVAAWSKSSCGTSADRIAAARALQDDPEIDKFGDIQLFEALAEDDAVCVWHKDGDAAKPPDPQPLIDYALAAEAEFKKRHFKVPAYRHPDSLLHPIFCDFGNSRWDICFDVHKNMQTPFPRALCLTLWTGSEMKPVPLCWQSKRLARDLALGENAQNAETREVTRADRLGHAAANVPKNLPVKISGLFEQADWNGRLQVPRQQLEAIATRIAKHGFDDKAKEMRDSLQWLVTFSAKLQPQGPWCGFAATNHLKIDPQYWPHADANKARKGQARLILCRLPGLRVLSVDLGHRYAAACAVWEALTAEQVKVACQAARHEEPKESDLYLHLKRKMTKQKKGNQVEVEKTTIYRRIGADTLPDGKAHPAPXXXXXXXXXASGWGAAEKQKARLDALEKLGWKPVEKAEAQEDADAEEEEMSFRPSLSIDELMLSAVRTMRLALKRHGDYARIAYAMTAAYKPMPGDRKYYFTEAKELSANDDEATRANKHIEFIQDALLLWYGLTSSRGWRDHVAKQLWDSHITRLSGYQAPEEVGEEATSVERKNKQKENRERLHAVAMALVENEDLRETLHDAWKTRWEKDDGQWKTHLRRFKDWILPRGKAANDPTIRKVGGLSLARLAVLTEFRRKVQVGFFTRLRPDGTRIEIREQFGQSALAALEQLREQRVKQLASRIAEAALGIGRMMRPKGGKDPKRPDVRVDEPCHAIVIEDLTHYRPEETRTRRENRQLMTWSSSKVKTYLAEACQLHGLHLREVSASYTSRQDSRTGAPGIRCQDVLLKEFMRSPFWRKQVEQAEAKQADNKGDSRERFLCALDAKWKGKTVADWEKAGVIRLPARGGEIFVSADPASPAAKGLQADLNAAANIGLRALTDPDWPGKWWYVPCEPGSCRPIKDKVDGSTAVKPDQALRQPAQAQSGDARDKKKRGKKGAGKSKEVVNFWHDISSSPLECIESGEWREYIAYQNDVQSRVIRVLEKQIKGLDKQPHDGSGDDDIPF

SEQ ID NO: 61664 - protein, 812 aa, Unknown
  TPA ASM bacteria DHGN01000237.1_o
LVGGNDPFEEQLRRFQRRSTMPRQDKPPVTQRAYTLRLRGADPNDKSWRDALWWTHEAVNKGAKAFGDWLLTLRGGLDHALVTTKVKVGKGKPDRDPTDEERKARRILLALSWLSVESKLGAPAGFIIASGQEAAAARNGKVIAALEEILTSRNVAKNEIGDWKNDCSASLSAAIRDDAVWVNRSKAFDEAVKSVGCSLTREEAWDMLERFFGSREAYLAPVKGSEDESSETEQEEKAKDLVQKAGQWLSSRFGTGKGADFSRMAKVYQKIADWAAACSPNKTGTDAIACLAASLSEFNPASNDLQGVLDLISGPGYKSATRNLLTQIAAKATVTQEDLTKLNETAAADKGKCETNTGSKGQRPYSDAILKNVESVCGFTYLQDGGPARHSEYAVILDHAARRVSLSHTWIKRAEAERRKFEEDAKKIDQVPNAAKDWLDQFCLERSGVSGALEPYRIRRRAVDGWKEVVAAWSKSSCGTSADRIAAARALQDDPEIDKFGDIQLFEALAEDDAVCVWHKDGDAAKPPDPQPLIDYALAAEAEFKKRHFKVPAYRHPDSLLHPIFCDFGNSRWDICFDVHKNMQTPFPRALCLTLWTGSEMKPVPLCWQSKRLARDLALGENAQNAETREVTRADRLGHAAANVPKNLPVKISGLFEQADWNGRLQVPRQQLEAIATRIAKHGFDDKAKEMRDSLQWLVTFSAKLQPQGPWCGFAATNHLKIDPQYWPHADANKARKGQARLILCRLPGLRVLSVDLGHRYAAACAVWEALTAEQVKVACQAARHEEPKESDLYLHLKRKMTKQKKGNQVEV

SEQ ID NO: 61665 - protein, 1465 aa, Thermomonas hydrothermalis
MSEKTTQRAYTLRLNRASGECAVCQNNSCDCWHDALWATHKAVNRGAKAFGDWLLTLRGGLCHTLVEMEVPAKGNNPPQRPTDQERRDRRVLLALSWLSVEDEHGAPKEFIVATGRDSADDRAKKVEEKLREILEKRDFQEHEIDAWLQDCGPSLKAHIREDAVWVNRRALFDAAVERIKTLTWEEAWDFLEPFFGTQYFAGIGDGKDKDDAEGPARQGEKAKDLVQKAGQWLSARFGIGTGADFMSMAEAYEKIAKWASQAQNGDNGKATIEKLACALRPSEPPTLDTVLKCISGPGHKSATREYLKTLDKKSTVTQEDLNQLRKLADEDARNCRKKVGKKGKKPWADEVLKDVENSCELTYLQDNSPARHREFSVMLDHAARRVSMAHSWIKKAEQRRRQFESDAQKLKNLQERAPSAVEWLDRFCESRSMTTGANTGSGYRIRKRAIEGWSYVVQAWAEASCDTEDKRIAAARKVQADPEIEKFGDIQLFEALAADEAICVWRDQEGTQNPSILIDYVTGKTAEHNQKRFKVPAYRHPDELRHPVFCDFGNSRWSIQFAIHKEIRDRDKGAKQDTRQLQNRHGLKMRLWNGRSMTDVNLHWSSKRLTADLALDQNPNPNPTEVTRADRLGRAASSAFDHVKIKNVFNEKEWNGRLQAPRAELDRIAKLEEQGKTEQAEKLRKRLRWYVSFSPCLSPSGPFIVYAGQHNIQPKRSGQYAPHAQANKGRARLAQLILSRLPDLRILSVDLGHRFAAACAVWETLSSDAFRREIQGLNVLAGGSGEGDLFLHVEMTGDDGKRRTVVYRRIGPDQLLDNTPHPAPWARLDRQFLIKLQGEDEGVREASNEELWTVHKLEVEVGRTVPLIDRMVRSGFGKTEKQKERLKKLRELGWISAMPNEPSAETDEKEGEIRSISRSVDELMSSALGTLRLALKRHGNRARIAFAMTADYKPMPGGQKYYFHEAKEASKNDDETKRRDNQIEFLQDALSLWHDLFSSPDWEDNEAKKLWQNHIATLPNYQTPEEISAELKRVERNKKRKENRDKLRTAAKALAENDQLRQHLHDTWKERWESDDQQWKERLRSLKDWIFPRGKAEDNPSIRHVGGLSITRINTISGLYQILKAFKMRPEPDDLRKNIPQKGDDELENFNRRLLEARDRLREQRVKQLASRIIEAALGVGRIKIPKNGKLPKRPRTTVDTPCHAVVIESLKTYRPDDLRTRRENRQLMQWSSAKVRKYLKEGCELYGLHFLEVPANYTSRQCSRTGLPGIRCDDVPTGDFLKAPWWRRAINTAREKNGGDAKDRFLVDLYDHLNNLQSKGEALPATVRVPRQGGNLFIAGAQLDDTNKERRAIQADLNAAANIGLRALLDPDWRGRWWYVPCKDGTSEPALDRIEGSTAFNDVRSLPTGDNSSRRAPREIENLWRDPSGDSLESGTWSPTRAYWDTVQSRVIELLRRHAGLPTS

SEQ ID NO: 61666 - protein, 1000 aa, Unknown
  Microbial Source - Accession No. Ga0063162_1014580
  misc_feature (963)..(963): Xaa can be any naturally occurring amino acid
MSQNPAPPVTQRAYTLRLRRGPGKCPACQKDACDCWRDALWATHEAVNRGAKAFGDWLLTLRGGLCHTLADIDVPAKGKKPARNPTKQEQRDRRVLLALSWLSVEDERGAPNGDGLRIATGKEPADKRGEAVKAALRNILGNRGVNASEADSWVKDCEASLAASIRDDAVWVNRSAAFDAACNGQNLRQAREDARTLLWYLLTDDYLVLPKANKKESEDTGEDQEEGQDEESAVDEAAEAVAKSAKGAGQRTRHLFSHIFGRQSTQGFGKPPCQLDLRDYWQGHLKPLIEAAGIPLSDPNVTAKKGAAPSPTELHREMFSKAASRLAQIWTKQKQQEVARQLRAAADDELKELESDQTYSKALDLLEAYCRERGQITGSLEEYRINPRAVEGWERVVAAWEGIKSSDPTEAQQRRIDEVKRLQDESDDKKFGDNNLFVSLAEPEYEPVWQHKGQATPSVLKTFVKGWKARSDAARLKVAAFRHPDPYSHPVFCQFGVSRPWIKHGRLDPKGNAGTVQMLLWTGSKADKVQISAVSKRFDAEIGSASESTVIAARQVARRHRLAVAAVSTSGAGVNTIRVAHVFDQQEVRSRERAVEHGIEDENGDDESQNARKKGPIWNGTLQADRQALKAIGKLASSQKAPQAYRCLQWRLTVALELQSSGPWYDYVRNATDQSPFQRTVRKDEDKGKKRKKGTKYLFLDGWPFEEVNNPLKVNRVDTLLLADKRSARGREAKIVLSRLPGLRVLSVDLGHRYAAACAVWEALPNAAFKGEVAGLKVRAGGPGEDDLYLHVEKPGDDGKTKTVIYRRIGPDSLPDGQFHPAPWARLDRQFLIRLQGEDEEAREASNEEIWKVHQLEAELGRTVPLIDRMEKGTFGQTEKQKQRLEALRGLGWTPATTNVPPGAAGEEEGETRIVSRSVDELMFAAVRTMRLALRRHGDRARIAFAMTGDHKPLPGGRKYYFXMTCSRRGAGKMMRPRSSGSKASPPCRDARRRRRSRKI

SEQ ID NO: 61667 - protein, 428 aa, Unknown
  Microbial Source -  Accession No. Ga0065719_107896
  misc_feature (231)..(231): Xaa can be any naturally occurring amino acid
  misc_feature (265)..(265): Xaa can be any naturally occurring amino acid
  misc_feature (277)..(277): Xaa can be any naturally occurring amino acid
  misc_feature (287)..(287): Xaa can be any naturally occurring amino acid
  misc_feature (298)..(298): Xaa can be any naturally occurring amino acid
MKRTVPIKLPADDSLVKTIQLFTQIANEVSKQVWELKTPIRNFVTLYKHCYHNLRTKYPHVNSRFIGYILRIVAGRYSPKNFRKLKEAVVFKRDFALLDKRLFTIKDGHITLWTIDGRKEFPFVLPKVGRFLELWKRKEDVDSITLKVRNGEVIGFLCLTIPESEPKDAKHFVGIDIGASYPLIAVRDDGAIFCPDYSTFHKKRQHFFELRRQLQRKLTEKRLAKKDAKSXIRALRRLSGRQRNFTKQFLRWVVCRLFDWAGDAXIIMENLHLPQGXKVKNAKALNXTLSLLPAGIIXQAIVNKAAELGLQVIFVPPAGTSQTCPRCQNKGKRPNRDLFVCPYCGYEEHADIVGARNILRKGLERFSQSGAETGDKPVGLCQPHESLPADEAGGGNSTIVLQKRLQSTLKKLPATEGRLQPSLFSTEN

SEQ ID NO: 61668 - protein, 428 aa, Unknown
  Microbial Source -  Accession No. Ga0065719_116807
MRRTVHIYLPMDEDLVATIRLFTQIANELSKKVWEMKEPIRHPLALRKRYYHALRAQYPQVASRVLEYIIKIVAGCYSPKKFRKLDNAVEFKKDFALFDKRLFKIEGDQIVLWTINGCKRYPFVLPKVGRFQKMWACKEDVDSITLQIKKERIVGHVCLTVPAGKPREVKHIVGIDIGASYPLIAVRDDGAVFCPDYSTFHKKRQHFFELRRQLQRKLTEKRLAKKDAKSVIRALRRLSGRQRNFTKQFLRWVIRRLFDWAGDAVIVMEKLHLPQGKKVKNAKALNRTLSLLPAGIIKQAIVDKATELGLRVIFVPPAGTSQTCPRCQNKGKRPKRDLFVCPYCGYEEHADIVGARNILRRGLERFSQSGAETGDKPVGLCQSHESLPADEAGGGNPIIVPPKRLQSTSKKLSATEGRLQPSLFFAEN

SEQ ID NO: 61669 - protein, 1497 aa, Unknown
  Microbial Source -  Accession No.  Ga0067045_1002454
MPQQTNLPDTQRAYTLRLREADPNDLSWRTALWKTHEAVNKGAKAFGEWLLTLRGGLDHTLADTQIKQKDPSGRNPADEKRKARRILLALSWLSVESEIGAPADYIIASGKEAAENRNRKVIASLEEILKSRNLAENEIEDWKADCSASLSAAIREDAVWVNRSKAFDDAVKLAGCSLTREEVWDMLERFLGSRDAYLAPVKGSEDESSETEQKDEAKDLVQKAGQWLSSRFGTGKGADFSRMAAVYGRIAAWAGKNKSNGSVTVDDLVKELQQHFDTTESKATAGINWIFELSSYPGHSPNPVHELLQNGPKLGRDKLDNLEKKANTRAESCRSKIGSKGQRAYADAILKDVEAVCGFTYRIDENGNAVSVADYSRYDDDYKWGPARHFEFAVILDHAARRVSLAHTWIKRAEAERRRFEEDAQRIANVPPPVKEWLDEFCRKRSQESGALEDYRIRRRAVDGWKEVVAAWSKADCKNAEDRIAAARALQDDPEIDKFGDIQLFEALAEDDAVCVWHKDGDAAKTPDPQLLIDYVLAAEAEFKKRHFKVPAYRHPDSLLHPVFCDFGKSRWDICFDIHKNPQTPFPRALCLTLWTGSEMKPVPLCWQSKRLARDLAIGQDIESDEAVEVTRADRLGRAASNVTKSDAVKISKLFEQKDWNGRLQAPRQQLEAIARYVEKHGWDQKAEKMRDRIQWLVTFSAKLQRKGPWYDFIKNSFDKTAFIRIHKRGEKKGTEYISQDGWPHEEANESRQGLARLILSRLPGLRVLSVDLGHRYAAACAVWETLSSKDMKKACQAAEHEEPKESDLYLHLKKKVKKQKKGKEVEVEETTIYRRIGTDTLPDGTSHPAPWARLDRQFLIKLQGEEEGVREASNEEIWKVHQLEVELGRTMPIIDRLVKAGWGSTEKQQARLEQLKRLGWTPTVVPEAEAGEDADEYAIRWPSLSVDELMSSAVRTMRLALKRHGDRARIAHYIITDEKTKPGGIKEKLDENGRIDLLQDALVMWHDLFSSRGWRDNAARQLWDDHIAKLSGYRAPEEIGEESSGSERRNKQKENREKLYDVAKALAQDVTLREALHDSWKNRWENDDEQWKRQLRWFKDWVLPRGKHASDPTIRKVGGLSLTRLATLTEFRRRVQVGFFTRLKPDGIRVETKEQFGQSALDALEHLREQRVKQLASRIVEAALGIGSEGGKGWNKRKRPQERIEDPRFAPCHAVVIEDLTHYRPEETRTRRENRQLMTWSSSKVKKYLSEACQLHGLHLREVSASYTSRQDSRTGAPGIRCQDVPVNEFMRSSFWRKQVAQAEKKEAEGKGDARERFLCSLNAKWKDKTVKDWEKAGVIRIPLNGGEIFVSADANSPVAQGIHADLNAAANIGLRALTDPDWPGKWWYVPCDPNSFMPIKDKVEGSAAVKPDQALRQSAQTQNGDAATDKKKGGRKRAGKAKEIVNLWRDISSSPLESIEVGEWREYAAYQNEVQYRVIRVLEEQIKGRDQANTR

SEQ ID NO: 61670 - protein, 1469 aa, Unknown
  Microbial Source -  Accession No. Ga0067045_1004962
MPQQDKPPVTQRAYTLRLRGSDPSDTSWRKALWQTHEGVNKGAKAFGDWLLTLRGGLDHTLADTKVKGGKGKPDRDPTDEERKARRILLALSWLSVESKIGAPAVYIIASGKEAAEDRNGKVVAVLEEILRSRNVAENEIGEWKNDCSASLSAAIRDDAVWVNRSKAFDEAVKSVGCSLTREEAWDMLERFFGSRDAYLAPAKGSEDESSETEQEDKAKDLVQKAGQWLSSRFGTGKGADFCRMADVYGKIAAWADKAQAGMTGNDAINNLAAALNESTLASNDLQGVLGLISGPGYKSATRNLLNQLATKTTVTQQDLASLKDKATKDAQKCNQNTGSKGRRPYSDAILKNVEAVCGFTYLQDGGSARHSEFAVMLDHAARRVSLAHTWIKRAEAERRKFEEDATKINNVPSAAKNWLDEFCRKRSETSGALEPYRIRRRAVDGWKEVVAAWSKSSCSTSADRIAAARALQDDPEIDKFGDIQLFETLAEDDAVCVWHKDGDAAKAPDPQPLIDYALAAEAEFKKRHFKVPMYRHPDALLHPIFCDFGCSRWSIKFSLHEAKKNAEKKRKKKDDVQQPDSPRSLWMTLWTGKEMKLVPLRWQSKRLARDLALGQDARKDGASEVTRGDRLGRAASNVTKSDDVKISGLFEQADWNGRLQAPRQQLEAIARRVNNHGWDETAKKMRDRLQWLVTFSARLQPQGPWCEFAEKLQLRINPQYWPHADTNKDRKGHARLILSRLPGLRVLSVDLGHRYAAACAVWEAVNAEQVRGVCQIAGHEEPKASDLYLHLKRKTTKQKKGKEVEVEKTTIYRRIGADTLPDGTPHPAPWARLDRQFLIKLHGEDEGTREASNEEIWAVHQMETVLGRSVPLIDRLIAAGWGCTEKQKARLEELNKLGWTSVPKAESSGEQEENEEADVYKPSLAVDELMSSAVRTMRLALKRHGDLARIAHYLITDEKTKPGGTKEKLDENGRVDLLQDALVMWHDLFSSRGWRDEAARQLWDEHVAKLSGYKAPEEIGEESSGPERKKKQKENREKLYDVAKAMAQDVILRETLHDAWKKRWKDDDERWKKQLRWFKDWVLPRGKHASDPTIRKVGGLSLPRLATLTEFRRKVQVGFFTRLQPDGTRAETKEQFGQSALDALEHLREQRVKQLASRIAEAALGIGRMRRPMGGKDPKRPDVRVDEPCQAIVIEDLTHYRPEETRTRRENRQLMTWSSSKVKKYLAEACQLHGLHLREVSASYTSRQDSRTGAPGIRCQDVPVDEFMRSLFWRKQVKQAEAKQSENKGDASERFLCDLNAKWKDKTVADWEKAGVIRVPLRGGEVFVSADPNSPAAKGLQADLNAAANIGLRALTDPDWPGKWWYVPCDPASFKPTPDKVKGSAAINLDMPLKDASVVSGDATMKKAGKAKSQSKEVVNLWRDVSSREVSTTDVAWEVYSAYQNQVQTRVVNILRRSACPKDNREKQS

SEQ ID NO: 61671 - protein, 888 aa, Unknown
  Microbial Source -  Accession No. Ga0068669_10235961
MFNKKKGYRLHLERIIYSGGEITRSIKYLLASHSDSQKNKELLNNFSQDLYNDDLKIRGCLNLNDLVNNNQIYNLADFWIDSLRAGVIWQSSASSLIDFIKRLNHQETIGEKIFNNANERIKRFFNSEKFIKEIILSEPKRISSKKQAFYNSLFDILKDEFKKQEKNEKIIIDNKAEQLIKEIVDAFYSNDGVFLMEGEEKQNKFWQENFNIDKNMIKKEKEDILKDVGDITAFIHPPLIILKGDVSQLIDERKKYFSEKDLEEILGLSDNFNAFSHYFNKFFLLLYQDKQEKIFECYQKIFSFSQEDRKRIKDALDFLLEKSKLLGLPKIVNSWSDYRSVFGGKIKSWFSNYLNREDKAKKQEKKIKEGLEKVNKFLLDFIQKNQVDSDLQQEIKFYYDKLNQFINSYQNQEFFHQQELFLLFSDLLAEYREKLNRFYQKYLSDKEKEEKKVDEFPLFKDLFEKYEGPISFYGKTKLEDNKKIIDLTFKTIKVGLNLIRRLLIDLYNSSDFKNSDNNNQERDLRRIFEFLLNKIPATKTFREKYLSILKDNFDQQTYKEMTLKPSRYTFVENIYSRENRKLIELPSKNFEELLSKIIKDLTDFSLSFKNDDLFVDIYLLSDLVELAKTLISLVINYSNKSQFDSYKNELIDDTYQKAKKYLETFKISFFNSKKEANYFYQTRVLSELKGAVALFSKKYYQAKYNIQILKSNEIFPLFVKFSDLLKKEEINDINKLKLIFKKPYRYLIALKKIKFKKNQQQSSVIHLDKKNKDLVLISPQDEDFLFKLTSSFYQLQFLDRFVYPVKKWLNVDITLSEWSFILEKKYKINWDFNSGKPEFSEIDSRLYLNIPFKIKAINQQKILKPKELFLGIDVGEYGVGYALVNFKD

SEQ ID NO: 61672 - protein, 1335 aa, Unknown
  Microbial Source - Accession No.  Ga0068707_1002163
MKSLAQFQNLYALQKTLRFELKPEGHTRETFNRWLEEIEKEQASENENIVYQDLLRAKKYEKIKIILDEYHKDFIEQALAYANLTELEKYEELYRKSNRTSEEEEEFENTKESLRKQIANIFIKNPNKTVQERWKFLFSKKLIQNELIVWVKGNYELLSEKLKNEFPDESSIISTIEDFKYFTTYFRNYHENRKNLYSNEDKFSTIAHRLIHENLPKFIDNIAIYQKAKAVLNINEVEKELGLPEDTLDKIFSLDFFSKALTQKGIDQYNYFLGGKTENEVKKIKGLNEFINLYNQQQQDKNQRLPFLKVLYKLPLFERTSTSFRFEPIENDRDLIERIGKFYYNDLKQYRDDSQGDTTDILSGINTLLRHVHDYRDGLYVNGGITLTQISQKIFGSWSYINNALAYFYDTYIDASGVDHQGERKPKKQKQIQEKTKWLKQKQFPVILVEKALSEYKSIETNEDLKTRISDTTLCDFFKRCGNDDNGQDLFDRIEARLREKNEEGYSLEDLLKKEFTTERKLMQDKTKTLLIKNFLDVIQGDKDDITAGLLHFVKCLIPRTEISEKNELFYSGMEKYLNILSEVTPLYNKARNYLTQKPYSIEKVKLNFENSTLLDGWDENEESDNSCVLLRKRGYYYLGIMNKKHNMIFDRKIYPKATEGEAYYEKMIYKLLPGAYKMLPKVFFSEKNIDYFKPSEEILRIRNTASYSKNGQPQEGYQKASFSIEDCRKYIDFFKKCIANHWDWQKFNFNFSPTEYYQSIDEFYREIERQGYKIDFVKIPESYINQLIKENKLYLFKIYNKDFSEKKKSKGKDNLHTLYWKMLFDEKNLKDVVLKLNGEAEVFFRQKSILYNEEIWNKGHHYSELKDRFSYPIISNKRYAEDKFFLHVPITLNFKADGINNVNNMVNEFIKDNRDIHIIGIDRGERHLLYVSVINQKGDIVEQCSLNEIVTEYNGKIFKKNYHEELDNLEKERDRARKDWQTIANIKELKEGYLSHVIHKISKLILKYNAIVVMEDLNSGFKRGRQKVEKQVYQNFEKQLIEKLNYLVLKESNVDEPGGVLRAYQLANKFETFKKLGKQSGIIFYVPAAYTSAIDPVTGYIQYLYPLKQADSVEKARKFYSQFKRISYNPHKQWFEFSFDYNDFNIIYHGKSSWTICTTNTERYMWNRLLNNGHGGEELVYVTNELELLFGEYNIIYGDGKDIKQQITDVQDIDVDRTAKQFYKRINELLNLTLKLRHNNGKKGADEEDYILSPVEPYFDSRFESRKPSMQQTLPINADANGAFNIARKGLLLLERLNQLGVEEFEKTKKSNNKKTQWLPHELWVEYAQNHTRK

SEQ ID NO: 61673 - protein, 1231 aa, Unknown
  Microbial Source -  Accession No. Ga0068707_1009867
WVSTNFGTGEKSDADLILKKLNILVAADLIRFAKQSKVSFIKEMCNLLGIQGEDVDALRTGIGWKTGRKSKGRLAIDSLPEQVTSESIQRLQQKFEEEVSDKQRKTRDVPGWMPSFRQAIEKECGMPFRGDRDHIGEFAVMLDHAARRVSQAHSWIKRAEAERRRFEEDAKKMKVVPEKTKEWLDFFCSERSDTSGALEPYRIRKRAVDGWKEVVAAWSKADCLTTEDRIAAARALQDDPEISKFGDIQLFEALAEEDAMCVWHKDGDPANAPDPQPLIYYALASEADFKKRQFKVPAYRHPDALKHPVFCDFGKSRWAIDYEIHRNAKTPSPRALTLTLWTGKEMKPVSLRWQSKRLAHDLNIKSDGRGEGASLVTRADRMGRAASGVSKDDEVEIAGLFETKEWNGRLQAPRCQLEDIARHVDKHGWDSKASVMLNAVQWLVTFSARLQPQEPWREYAKNNENVNLNLDKKNRQPHTDENKNRKGRHAKLVLSRLPGLRVLSVDLGHRYAAACAVWETLSIESFRKEIRGRTIIRGGKDAEALYCHTEHEENGNKHVTIYRRIGADKLPDGATHPAPWARLDRQFLIKLQGEGEEAREASNEEIWAVHRMESELGRAVPLIDRLVAAGWGRTEKQAERLEALKRLGWEPPLATAPVVEDASGEDADAYRPSLAVDELMSSAVRTLRLALKRHGDRARIAYAMTATYKSMPGDRKYYFTKAEELSSNDDQATREEKHIEFILDALVLWQSLISSRGWRDEAAKLLWDKHIAKLPVYEAPEELGEDITSVERKKKRDNNREKLYGVAKALVQDRPLRNELHDAWNKRWEQDDARWREWLRWSRDWILPRGRQAGDHSIRKVGGLSLNRLATLTEFRRKVQVGYYTRLRPDGTRKEIGEAFGQKVLDDLEQMREQRVKQLASRIVEAALGIGSEDRAHWEGGKRPRQRIDDRRFAPCHAVVIENLTHYRPEETRTRRENRQLMTWSSSKIKKYLKEACQLHGLHLCEVTASYTSRQDSRTGAPGIRCQDVAVREFMLSPFWRKQVKRAEAKQAENKGDSRERFLCELNAKWKNKTEVEWRNAGVVRIPLRGGAVFVSADRRSPASKGIQADLNAAANIGLRALIDPDWPGKWWYVPCFSSSFIPTDESTKGSEAITGKPLKERPTDDTGKMATRKRSGRSSRSSGGVVNLWRDVSSLPVSADKGPWEEYQPYWNKVQERVVRILHDNMVDSG

SEQ ID NO: 61674 - protein, 850 aa, Unknown
  Microbial Source -  Accession No. Ga0068707_1024093
WSDYRSVFGGKIKSWFSNYLNREDKAKKQEKKIKEGLDKVNKFLLNFIQKNQIDPDLQQEIKFYYDKLNQFINSYQNQEFFHQQELFLLFSDLLAEYREKLNRFYQKYLSDKEKEEKKVDEFPLFKDLFEKYEGPISFYGKTKLEDNKKIIDLTFKTIKVGLNLIRRLLLDLYNSFDFKNSDNNNQERDLRRIFELLLNKIPATKTFREKYLSILKDNFDQKTYKDITLKPSQYTFEENIYSRENRKLIELPSKNFEELLSKIIKDLTDFSLSFKNDDLFADIYLLSDLVELAKTLISLLINYSNKSQFDSYKNELIDDTYQKAKKYLETFKISFFNSKKEANYFYQTRVLSELKGAVALFSKKYYQAKYNIQILKSNEIFPLFVKFSDLLKKEEINDINKLKLIFKKPYRYLIALKKIKFKKNQQQSSVIHLDKKNKDLVLISPQDEDFLFKLTSSFYQLQFLDRFVYPVKKWLDVDITLSEWSFILEKKYKINWDFNNGKPEFSEIDSRLYLNIPFKIKAINQQKILKPKELFLGIDVGEYGVGYALVNFKDEEIKIIKSGFIRSKNIASIRDKYRLLQDRSKKGVYFSSTNVVQEVRENAIGEIRNQIHDILIKNNADLIYEYNISNFETGSGRITKIYDSIKKSDVYAENEADKSVIQHVWGIKKSIASHLSAYGSSYTCSNCGRSIFSFSENDICSSKVIKRDGNIITIQTPKGEVFAYSKDKKFNVGYSFSQEKSKEEMKNLFMKIVKAYARPPLLKSEVFLAQKKLDKEFLEKFKKERGNSAIFVCPFVDCQSLADADIQAAFIMALRGYLKKKKGKDINYLEESLNYLQNFKGKINFSNLLN

SEQ ID NO: 61675 - protein, 377 aa, Unknown
  Microbial Source -  Accession No. Ga0071330_1110381
VRKTIRIQLPKDADLLATMRLFREIANEVSKMAWEIREQLKGKFDLRRQCYPLLRSRYTHVNSRVLEYIIRVVNGCYSKKKRRKLSEPVVFRRNFALFDKRLFKFGDGNITLWTIAGRKNFPFTFAPVKRFKEYWEKKVDVDSITLKESDRCIVGFVCLTVPEPPFKVSHHFVGIDIGAECPLVAVRDDGAIFFPDFSKFHKKRKQFLQRRRYLQSKLAAQRLLGKDAHNTIRELKRLSGKQRRFTKQFLNWVINRLFNWMGDAVIVMERLKLPQGKKVKNAKALNRTLSLMPSGIIKQVILEKAKERGLRVIFVNPAGTSQTCPKCGGKGERVSRDLFRCHVCGFSCHADIVGAKNILKRGFERVVKQGAETGDEP

SEQ ID NO: 61676 - protein, 270 aa, Unknown
  Microbial Source -  Accession No. a0072682_101461
LKNLPLHPMPFHNQSVWIENKNGKFWIHFKTKQGETVCYLQVPAKYRSLIEKASGEKNPILGQVEIVEDQKYGWINCHITLRLPKPEPYEPRGWIGVDVGWNKLATSILATCNPHLRFSNPSIHGKDFKTRIIQLKYLLKQYARKGKAWKKWDYRLKHTIKYAVGSVAKEIVSKAKNLKAGVAMEKLTFKSTTKGYLVPRYKLMIAVKTLCERKGIPFMVVPAQNTSVTCPYCGYKDKKNRNGERFKCLNCGYQADADIAAAMNIAKRAL

SEQ ID NO: 61677 - protein, 456 aa, Unknown
  Microbial Source - Accession No.  Ga0073928_10004924
MKIIRTYKFRLRPTAAQAARMSSWCAAVRHVYNAALQQREWYGRAVGTDPHGRDSRFNSFRQGRELKDIRAAFKWIEDAPADILMAAVRDLDKAFDAFFASRARYPTPRRADQNNSFALPVFVQGKARPKGYFVNVVFGQDSVRLPKFGRVRWVRHRKIRGRPKTANVVREGDRWFICISSEIEIADRSPAAAAVGIDFGVAIPLATSDGETLSLARTAPRIAQREKRLRRELARCKRGSRRRSARKRRLSEHTRRTAARRKGRLHAITTDLARKYGLIVIEDLRVANMTASAKGTVDEPGSNVRAKAGLNRSLLDLSLHAFRALLTYKVAARGGTLIAVNPRNTSRTCAACAHVDKDSRRSQAIFVCVACGHEANADINAAKIILARGISQSSATVLGRRKAPSEPRQRPATPKSCGSPAMGRDQHSKFRGESAVSAAESAGCSSSGCGPRRCRW

SEQ ID NO: 61678 - protein, 968 aa, Unknown
  Microbial Source -  Accession No. Ga0073932_1022770
MLKSYDYFTKLYSLQKTLRFELKPIGKTLEHIKNSGIIESDETLEEQYAIVKNIIDKLHRKHIDEALSLVDFTKHLDTLKTFQELYLKRGKTDKEKEELEKLSADLRKLIVSYLKGNVKEKTQHNLNPIKERFEILFGKELFTNEEFFLLAENEKEKKAIQAFKGFTTYFKGFQENRKNMYSEEGNSTSIAYRIINENLPLFIENIARFQKVMSTIEKTTIKKLEQNLKTELKKHNLPGIFTIEYFNNVLTQEGISRYNTIIGGKTTHEGVKIQGLNEIINLYNQQSKDVKLPILKPLHKQILSEEYSTSFKIKAFENDNEVLKAIDTFWNEHIEKSIHPVTGNKFNILSKIENLCDQLQKYKDKDLEKLFIERKNLSTVSHQVYGQWNIIRDALRMHLEMNNKNIKEKDIDKYLDNDAFSWKEIKDSIKIYKEHVEDAKELDENGIIKYFSAMSINEEDDEKEYSISLIKNINEKYNNVKSILQEDRTGKSDLHQDKEKVGIIKEFLDSLKQLQWFLRLLYVTVPLDEKDYEFYNELEVYYEALLPLNSLYNKVRNYMTRKPYSVEKFKLNFNSPTLLDGWDKNKETANLSIILRKNGKYYLGIMNKENNTIFEYYPGTKSNDYYEKMIYKLLPGPNKMLPKVFFSKKGLEYYNPPKEILNIYEKGEFKKDKSGNFKKESLHTLIDFYKEAIAKNEDWEVFNFKFKNTKEYEDISQFYRDVEEQGYLITFEKVDANYVDKLVKEGKLYLFQIYNKDFSENKKSKGNPNLHTIYWKGLYDSENLKNVVYKLNGEAEVFYRKKSIDYPEEIYNHGHHKEELLGKFNYPIIKDRRYTQDKFLFHVPITMNFISKEEKRVNQLACEYLSATKEDVHIIGIDRGERHLLYLSLIDKEGNIKKQLSLNTIKNENYDKEIDYRVKLDEKEKKRDEARKNWDVIENIKELKEGYMSQVIHIIAKMMVEEKAILIM

SEQ ID NO: 61679 - protein, 759 aa, Unknown
  Microbial Source -  Accession No. Ga0079044_1002244
MPRRRPRVPRHTRSRKRGASERPTRRFRAAMTGPAARRRIGGGDERACAEAWYRRLGDRPRYGPEAIRRKSLRRGVVSATPCRLHTAPAEKPATRRRGVADAHRKCDNVTMGPPAEAPGPRRDTAHSTEEEIASMRVYRYGAKLRGPLDPVAEEQVELANRFWNELVDMHRKYGELLQKAQEEASPALAALRAEMAALAEEKIRLRGLIKKSRQKARGNVPADPAIKEQLRAVSQRIKELKPIVKMEKEKAKTASSDERHRLSEQQKLEKKRLRQKYAALGLYWSNYNAVLQGFDTAVKRELETQGRLRVRKHAPSGAAVWTVRIQHPTGAREYTWADATRGDPSKPFSIIMPDSEREEFTTHDGRTLSRRRLPVARLRVRAERAKTPDGTWVEFGGHHIDVPFYMHRQPPPTARVVMARLVRKRIADCYEYHLCITVDEPPAPKRSGTAAGVDLGWRRLPDGAVRVAYVAGEDGAKGALAVPQSTLDRLAHAERLQGIRDSALEGIRSDFVAWAKPLLGNPALPDFVAAALAGDREHGIPPLASWRSPRRFARLTGQLVRWAADHPNQAAALPDWPAWNRRIQSWNRQDKPLWRTLSFLRVKAIAHRNEQYRIFAKRLAERYAYIVLEDMDIQDMNRKPQAEQAPETSQQKLRHLARAAAPAAVRSAIENASWRWGSTFVKVDPANTTRRHAPCGNLVEQNYAESVMVYCPECKVWYDQDENAAVNLLLRIRENPPPAPTNPKPANGSRWQRAKAKAR

SEQ ID NO: 61680 - protein, 348 aa, Unknown
  Microbial Source -  Accession No. Ga0079639_1009487
VEETIKLTVRAVIPPRDVGLRKLMREYKAYKKALIPKVKQAVRHVIKDRNLRIYAQQKWMVDKKLNEYLKNLPFHPMPFHNQSVWIENKDGKFWIHFKTKEGEAVCYLHVPAKYRDLIEKACGEDNPVLGQVELIEDKKYGWVNCHICLRLPKPEPYKPKGWIGVDTGWNKLATSIACTCNPHILFFKPTFHGKKFKKQIIQLRHLLKQYARKGKAWKKWDYRLKNTIKYAVGVVAKEIVSKAKKLKTGVAMEQLTFQSTTKGYLVPRYKLMIAVKTLCEREGVPFKLVPAQYTSITCPKCGFVDEKNRNGEWFKCTKCGYQTDADLAGAMNIAERALTATQMEGRMA

SEQ ID NO: 61681 - protein, 527 aa, Unknown
  Microbial Source -  Accession No. Ga0099914_10727
NFDNLLELINLQKGYLFQIYNKDFSEYSKGKPNMHTMYWRALFDEENLKDVVYKLNGEAELFYRKKSIDDDKKIIHKANEKLANKNPLNPKRESKFSFHVPITMNFKADGNDYINQDVLKFLKNNPDVNIIGLDRGERHLIYLTLINQKGEILDGLQFSLNEILNTYKNSKGENVELKTSYHTLLDAKEKERDEARKTWKSIENIKELKEGYISQVVHIIAKMMVEFNAIVVMEDLNFGFKRGRFKVEKQVYQKLEKMLIDKLNYLVFKDVEESKSGGLYNALQLTNKFTSFKEMGKQSGFLFYVPAWNTSKIDPTTGFVNLFDTRYESIEKAQQFFKKFKSIQYNSQKQYFEFAFDYSEFTNRAEGSKTNWKVCTQGDRIITFRNPESNNQWINKKVNLSQEFEDFFGKHNVIYGNGENFQPQIEAQTTKEFFEKLLQLFKLTVQMRNSKSDEDYLISPVINKTGEFYDSREANDTLPKDADANGAYHIAKKGLWVLEQINETEDYKKLKLAISNKEWLQFVQKNN

SEQ ID NO: 61682 - protein, 956 aa, Unknown
  Microbial Source -  Accession No. Ga010790_149349
MPQQDKPPVTQRAYTLRLRGADPSDTSWRKALWQTHEGVNKGAKAFGDWLLTLRGGLDHTLADTKVKGGKGKPDRDPTDEERKARRVLLALSWLSVESKLGAPVDYIIASGKDAAEDRNGKVVAALEEILKSRNLADNEIGEWKNDCSASLSAAIRDDAVWVNRSKAFDDAVNSIGCSLTREEAWDMLERFLGSRDAYLTPVKGSEDESSATEQEEKAKDLVQKAGQWLSSRFGTGKGADFSRMAAVYGKIAAWAGAHSPNKDAIASLATALSEFTPASNDLQGVLGLISGPGYKSATRNLLTQIADKTIVTQEDLKKLNETAAADRGKCETNTGSKGQRAYSDAILKDVESVCGFTYRVDENGNAVSVSNYSLYGDDYNWGSARHSEFAVILDHAARRVSLAHTWIKRAEAERRRFEDDAQRMANVPGPVKEWLDSFCLERSGMSGGLEPYRIRRRAVDGWKEVVTAWSKSSCSTSADRIAAARALQDDPEIDKFGDIQLFEALAEDDAVCVWHKEGDAAKAPDPQPLIDYALAAEAEFKKRHFKVPAYRHPDALLHPIFCDFGKSRWDICFDVHKNAQTPFPRALCLTLWTGNGMVSVPLCWQSKRLAHDLALGQDVQNDGSSEVARADRLGRAASNVTKSDEVKISGLFEQADWNGRLQAPRQQLEAIAVVRDNLSLSDQERERRMSGMMDRIRWLVTFSAKLQPQGPWCEFAEKLQLRINPQYWPHADTNKDRKGHARLILSRLPGLRVLSVDLGHRYAAACAVWEAVNAEQVKKACQVAGHEAPKASDLYLHLKRKATKQKKGNQVVVEETTIYRRIGADTLPGGTQHPAPWARLDRQFLIKLQGEEEGVREASNEEVLKVYQLEAELGRTAPIIDRLVKAGWGQSGKQRTRLEALRELGWKPASEAAGVSDGMDADEGEVRKPSLSVDELMSSAVRTMRLALKRHGDRAR

SEQ ID NO: 61683 - protein, 540 aa, Unknown
  Microbial Source -  Accession No. Ga102924_1013089
MPFGNAARASRAYEYGVRFTAGEDLALLALREKVRLWNCLVAVDHDLRERRDALIGAYLTDHPPIDDTPVAAKAARKAAFADAGVKAALAELDREGQERSRLLGHESPLWWCNRDAVRTTWLQHRRDPEPSRFHSARRAEGTLIVRRSGGWTVASLLRGGDRFIGLGAVDPLGWSHSVRAERRRRCRVPLTLRIGSTPDREPIAVELTLFFHRPLPEGGNVQEVRLAATPLADTVRWTAVFVVALPEADAAPEPTAPAGTRAALDLGWRARPAGLRTAVWHDAGRWGELSLPEKDFAAQLGKVDDLRSIRDQHLNVAKAALAAWVKRQPSLPEWLGESTKTLGQWRSQGRLAGLVRRWARQRFEGDADIWPELAAWQAQDRHLWLWQEHLRDQVLHRRRECYRVFAADLARRYREVVLESVDWSKLARQGKELPPLARWHRVVAAPSILEEAIEHAVGREGGIVRRAEPAYTTMLCHVCGSIEAVDGVALYHVCVACREGGVHTRWDIDVNATRNLLANRPAAGKGGGFATDGPEERAGA

SEQ ID NO: 61684 - protein, 712 aa, Unknown
  Microbial Source - Accession No.  Ga0103818_10095
LEPHSPVLLLRPCPDLGRTGNRARLGGQPREPGRRRRPLQSFRREPVERNGEVSAPVQPEPVPSRRSLARLHPGDPDGARSRAVPDGLRRRTCRPGHPPHDGMVLPVVGEKPNNQGDQMDHVVEKDPTGDPIGLQFVVRQYGLLDPLDWDQDCQEHLWRENKFWNTLVELEKKHRDAYFRLTGSDPELKEIEDALSALMEEKEARIAEKKALRQAARKKAGVDTSAQDLRIEEIRPEIRRLSGLAKETRKKTRERMKPEIDALERTRREDVKIARNASGLWWGNYNAVCASYETARVRAMRTGGDLRFHSFDGTGRFTCQIQGGMTVSEFFSGDRNSVVSADPVSPDAFYHPSRGARRRAARTTLRITVYTTKDENGKYVRRILSFPMILHREIPSDVLIKQVVVTRKRVGATFRWTVTLTGTRSGSPRIVPGIPGLCGIDLGWRLVPEGLRVATIADDKGVRHIVLPEKMLRRMDHVEDLKSRIDLERDRIVTWLRAHWWGIVETFPEPIRERFVGHIRSLKVSPRKLAGSILAWRDDHGDFRPDLLAALEAWRKTNKRLTQEMDNLREKLSAQRTDLYRNEALRIVREHSCVALEDFDLREVVKLETPEGEKTDQPAAARANRVRAAVSDLRNWIGIQAAKTGTEIVKIPAADTTRACRQCLHVNVRSRPEELVWTCDACGAVWDQDENAARNLLMAAEMRQENAKKVSA

SEQ ID NO: 61685 - protein, 394 aa, Unknown
  Microbial Source -  Accession No. Ga0105154_1006902
LAGEEKLKLTVKCVIPPRDIGLQKLMREYSVYKKVLIPRVKQAVRQVIKDKTITVYAQQKWMIDKKLNEYLKNLPLHPMPFHNQSVYIEKKDGKFWIHFKTKRGEAVCYLHVPAKYHDLIEKACGKDNPVLGQVELVEDKKYGWVNCHITLRLPKPEPYEPLGWVGVDIGWNKLATSIACTCNPHIRFFNPTFHGKEFKTRIIQLRHLLKEYARKGKAWKKWDYRLKHTIKYAVGVVAKEIVTKAKKLKAGVAMESLTFKSTTKGYIVPRHKLMVAVKTLCEREGIPFKLVPAQYTSITCPKCGHINSKNRDGEWFKCLKCEYQTDADLVGAMNIALRALDSCPNGGQIDVGHAPRLKPMGLYAPEGGDVATPLRGMNDDLYKATRKTEKIEER

SEQ ID NO: 61686 - protein, 380 aa, Unknown
  Microbial Source -  Accession No. Ga105158_1004615
MEETIKLTVRAVIPPRDLGLRKLMREYTAYKKVLIPKIKQAVRRVIKDKSIRVYAQQKWMVDKKLSEYLKNLPFHPMPFHNQSVWIEDKDGKFWIHFKTKEGEAICYLHVPLKYHSLIEQACGEGNPTLGQVELVEDKKYGWVNCHICLRLPKPKSYEPKGWVGVDVGWNKLATSILATTNPHLTFSNPTFHGKQFKTRIIQLRYLLKQYARKGKAWKKWDFRLKNTIKYAVGTVAKEIVSKAKRLKAGVAMEILTFKSTTKGYIIPRYKLMIAVKTLCEREGVPFKLVPAQYTSITCPKCGYADDENRNNERFKCLKCGYKADADIVGAMNIALKALDGTADEAVNGMGLAPMPKTLRLYAERGGHVASPLRAMTDDPL

SEQ ID NO: 61687 - protein, 824 aa, Unknown
  Microbial Source -  Accession No. Ga0114945_10008792
VRASRIRIPRWTSGRLDHSSVRSSDEESVPWGGEGCQGGVDGARRFRYLLDSVCRTTHRSEHLPKGGRNHGSTCQTAAVGSRPNAPARPRIARADAPSRAPRARPARSALQGRAARHPCAARIPDALRAARRSVVPTLRRRIGSRARVCSGVRTQAACRHHRHRGGVVMRPWWQREHAERADADGQSSLVVEAPLHEPSRWKRRVLEHCSVLVSNATAALLAFIRERLVVTPDVEDATKIASADLAFEVGKEHASRIAALLAQVKHDRETGERLPFSNAYRFTACEPVPGTDRFRVVARLADGTWRERKLKRGGVRRTHGINCIHATTGFQQLLATYAAPKLLHVVPPALRAGVCQEVAQQVLSYLGQLESSKVRGDVAFPTVEDRDPVRRRQAYEDAIDALVADLTPFSYAKLRDKFPGEYAADDPRGDRLIVDDPRWFAVTTTPDPHPIPLLFSQGSAVRLLEGSTSFDAGVSKRNRHRGSSTASESVRQSRPDAVQRKGTTGLRQWYAAIPLLDADDDALRAIAAAAHERSGRQLDLALHPLPLDGGVRWRRRERDVLVPLSGDRKRLERILRNPNLHIAWSRLVQKRTGWVLQLTVRIPMQPAVEHRRVLGVSFGIDAVATWSLVDEDGVELEHGALAPNEQILTFLREKRQLEWDQEKGRWIGKQRFAMQLESIAHGVANTLLAIAEEHHAVLAVEDVSWVKKAGPNHAQNVLFTAWNFGQLRRILSYKSPMVGRGDPVTVSDYVVSYTCPTCGACRKPKQKPDHADTWRDGDTLSCRSCGFQGVLSPSDRARRVTANGLTIWQDRWQRSDERNGTETS

SEQ ID NO: 61688 - protein, 867 aa, Unknown
  Microbial Source -  Accession No. Ga011614_1003707
DYFSITEIEVALWNYRTENDLLKDLEEEQHLIANYFNSYFKTTVNDKEYDLVANVTAKYSCIKGLLEQDYPEDKKLNQETKEIDDIKAFLDALMLVLHFVKPLMLPHDSTLEKDQSFYNTIAPYYEELQYLISLYNKVRNFASQKAYSVEKYKLNFENSTLLAGWDVNKEPDNTSVLFRKENDYFLGVMDKKHNGIFKKTPKSKTQDTYSKVNYKLLPGASKMLPKVFFSRSNIAFYNPSEEIITIRNHSTHTKGGTPQTGFEKKDFNLSDCRKMIDFFKDSIAKHPDWKQFGFNFSDTDSYDSIDGFYREVEAQGYTISYTEIDETYIHQLVDEGKLYLFQIYNKDFSEFSKGKPNMHTLYWKALFDSENLRDVVYKLNGQAEIFYRKSSIKKDKIIVHKANEKVANKNPLNTKKESLFTYDLVKDKRFTVDKFQFHVPITLNFKASGNDYINQEVLSFLRQNPDVNIIGLDRGERHLIYLSLINQKGEILQQFSLNDIINEYKGITHKTAYKTLLEKKEKERADARENWGTIESIKELKEGYISQVVHKIAKMMVEYNAIVVMEDLNMGFKRGRFAVEKQVYQKLEKMLIDKLNYLVFKDKAPNEAGGLYNALQLANKFESFQKMGKQSGFLFYVPAWNTSKIDPTTGFVNLFYTKYESIEKAQKFFEKFDSIHFNTKEQYFEFAFDYDNFTERATGTQTQWTVCTQGERILTFRNPSANNQWDNKEIKLTEQFEDLLGKHNISYGSGTCIKAQVATQSGKDFLKGMMDLFKLTLQMRNSITNSEVDYLISPVRNAQGSFYDSRNADATLPKDADANGAYHIAKKGLMWLHQIHEFEGNDWRKLDLDKTNKGWLNFVQPKNKTNE

SEQ ID NO: 61689 - protein, 1089 aa, Unknown
  Microbial Source -  Accession No. Ga116143_10029534
MPQQAKPPVTQRAYTLRLRGAGPSDISWRKALWQTHEGVNKGAKAFGDWLLTLRGGLDHTLADTKVKGGKGKPDRDPTDEERKARRVLLALSWLSVESKLGAPEGYIIASGEEAAEDRNGKVVTVLEELLKSRNVPNNEISEWKNDCSASLSAAIRDDAVWVNRSKAFDDAVKSVGCSLTREEAWDMLERFFGSRDAYLAPVKGSEDESSETEQEDKAKDLVQKAGQWLSSRFGTGKGADFCRMADVYGKIAAWADNAQADTTGNDAINNLAAALNESTLASNDLQGVLGLISGPGYKSATRNLLNQLATKTIVTQQDLANLKDKAIKDAQKCNQNTGSKGKRPYSDAILKNVEAVCGFTYLQDGGSARHSEFAVILDHAARRVSLAHTWIKRAEAERRRFEEDTQRLANVPGPVKDWLDSFCSERSGTSGALEPYRIRRRAVDGWKEVVTAWSKSSCSTSADRIAAARALQDDPEIDKFGDIQLFEALAEDDAVCVWHKEGDAAKAPDPQPLIDYALAAEAEFKKRHFKVPAYRHPDALLHPIFCDFGKSRWDICFDVHKNAQTPFPRALCLTLWTGNGMVSVPLCWQSKRLAHDLALGQDVQNDGSSEVARADRLGRAASNVTKSDEVKISGLFEQADWNGRLQAPRQQLEAIAVVRDNLSLSDQERERRMSGMMDRIRWLVTFSAKLQPQGPWCEFAEKLQLRINPQYWPHADTNKDRKGHARLILSRLPGLRVLSVDLGHRYAAACAVWEAVAKGDFEKECSNAKGKGAEIHYGPDGCKPEDAIYAHLVWPEKASNSATKKAKTEGRDKFHPVTIYRRIGADTLPDGTQHPAPWARLDRQFLIRLQGEEEGVREASNEEVWKVHQMEAELGRTAPIIDRLVKAGWGQSGKQRTRLEALRELGWKPASEAAGVSDDMDADEGDDRKPSLSVDELMSSAVRTMRLALKRHGDRARIAHYLITDEKTKPGGTKEKLDENGRVDLLQDALVMWHDLFSSRGWRDDAARQLWDEHVAKLSGYKAPEEIGEEFSGPERKKKQKENREKLHDVAKAMAQDVTIREALHDAWKKRWKDDDERWKKQLRWFKDW

SEQ ID NO: 61690 - protein, 1236 aa, Unknown
  Microbial Source -  Accession No. Ga116146_1004071
MMMSQKEKPATTQRAYTLRLRGVNPNDNSWRHALWQTHEAVNKGAKVFGDWLLTLRGGLDHSLVAADNSDRIPTDEERKARRILLALSWLSVESERGAPEKYIVASGKEASTDRDIKVIAALEEILKKRKLSDDEIKGWIDDCKASLSAAIRDDAVWVNRSKAFDDARVGRASFRSHAVWVNRSKAFDDAVNVKRIGDSLTREEVWDMLDYFFVSAEAYLKPIKISGDESTDTEKEEKAKDLVQKAGQWLSGRFGSGKGADFPRMAKVYEKIVQWADQAEADTAGGEAISNLVEALKEFKPASEDLDGVLGLISGRGYKSATRNYLQQIHTKSNITKEDLDNLKKKADEDRKKCLGKSGSKGQRPYADAILDDVERDCVFTYRVAENGEHVSVLDYSKYKEGCKWGTSSHQEFSVMLDHAARRVSLAHTWIKRAEAERRKFEEDAKKKDFVPKSASKWLDQFCEERSEASGALEPYRIRRKALDGWKDVVEAWSDKSCKTNTDRIEAARALQHQIDKFGDIQLFEALAADDARCVWHKDGNETASPDPQPLIDYVLAAEAEFNKQRFKVPAYRHPDALLHPVFCDFGNSRWSIDFSIREATTELNKAKKKLQKTEEAFTKATNVFVTDRENGKKREKLEKAKKELTDARQEVKRLSSARRLSMTLWTGIVLENKFPLCWQSKRLVQDLALSQKEQKCEATEVTRADRFGRAASNVTKSDDVEISGLFEQKDWNGRLQAPRQQLEAIAKVRDNDSLPTEERDRRICKMKDRIRWLVTFSAKLQPMGPWCDFAEKHRELELKIDPQYWPHAEENKKRKGQARLILSRLPGLRVLSVDLGHRYAAACAVWETVDSRQVEDACKDANHERPKSEDLYLHLTKRKNAGNDVEKTIIYRRIGADNLPNGTPHPAPWARLDRQFLIKLQGEEEGARMASDEEIWAVHQMEAAFGRSVLLIDRLVASGWGSSDEQKARLEKLKGLGWTPAKQPSSNYESDLDQGEFFKPSLSIDELMYSAVRMMRLALKRHGDRARIAFAMTAEYKTMPGDRRYYFAESKELSVEDNQEVRDSKRVEFIRDALVLWYDLAYSQGWRDNKARQLWDEYIAKLPEYGAFDEKIEESAAQGDKKRNEEIKEKLNNVPRVLANNESLRKDLHDAWQCRWEEDDDQWKKQLRWFKDWILPRGKAAKDPAIRGVGGLSLTRLATLTEFRRKVQVGFFTRLRPDGTRQKPRKGLGKALWMH

SEQ ID NO: 61691 - protein, 1496 aa, Unknown
  Microbial Source -  Accession No. Ga116159_1001590
MADDLSTQRAYTLRLQGTDPEDQSWRDALWMTHEAVNAGGRAFGDWLLTLRGGIAHELADTPVKGKKDITDELRKNRRILLALSWLSVESRRGAPDKFIVAGGEEPAGSRNEKVLQALKEILKRRGLSAEESESWMSDCRASLSAAIRDDAVWVNRSAAFDDAQVRIGASLTREDIWDMLDPFFGSREAYLTPAKKKKEDEDSSEGTGEEKAKDLVQKAGQWLSSRFGTGKGANFAAMAEVYSKISEWAGTAQEGVSGKEGIKNLADALAAFSPVSQNLEGVLKLISGPGYKSATRDLLGELDSLPVVSRDHLSALHEKAAEDTVKCKESTGTKGRRPYADAILNDVEKRCGFTYLTDSDNRSVSILDTSEFPSDYKWGTARHSEFAVILDHAARRISVAHSWIKLAEAERDRCEEDAAKVYDLPDKVKEWLDTFCSNRSDISGAQGEGYRIRRKAIEGWKEVVASWGRSSCITAEDRVAAARALQDDPEIDKFGDIQLFEILAQDEALCVWHKDGDVAKSPDAQMLIDYVLASDAESKKRRFKVPAYRHPDALLHPIFCDFGNSRWDITYDIHGARGKKKAKRGSKKEEAMPRGVAMKLWTGSDVLSVSLRWQSKKLAADLALDQEAEEVTDTAAVSRADRLGRAAAGIDRGAGVTIAGLFEEAHWNGRLQAPRQQLEAIAAVRDNQKLSSEERERRIAFMKDRIRWLVTFSAKLRPQGPWHSYAPTQGLQSDPKYWPHSEINKKRKGQAKLILSRLPGLRILSVDLGHRFAAACAVWETMSSEAIQEACRLANHQLPAPADLYLHLKRTVQKNLIDGEKTVEESTVYRRIGADRLPDGTAHPAPWARLDRQFLIKLQGEEKVREASNEEVWQVHLMESALGLSFPLIDRLVYAGWGGTEKQAARLEALREKGWKPTGTPADQDEEGGGYKPSLAVDELMFSAVRTLRLALKYHGDRARIAFALTADYKPMPGDTRYYFSEAKDRSSGADAAEREAKHKDYLLDMLLLWHDLAFSRKWRDEEAKELWNLHIAALPGYQAPAAPIQEEAGQGRKKAREEARAKMTPAAEALLADGTLREKLHGLWKERWEKDDAQWKKHLRWMKDGILPRGGRAATPSIRYVGGLSLTRLATLTEFRRKVQVGFYTRLFPSGEKREIKEAFGQTALDALERLREQRVKQLASRIAEAALGAGRVSRTALKQDPKRPEARVDAACHAVIIENLEHYRPEETRTRRENRGLMNWASSKVKKYLSEACQLHGLFLREVPAGYTSRQDSRTGAPGMRCQDVTVKTFLNSPFWQKQCVQAQKNKSTARDRFLCALKEAVAQGGMEEEKKMGPIRVPVPGGEVFVSADAASPAAKGLQADLNAAANIGLRALLDPDWPGKWWYVPCDRKTAYPAKEKVEGSAAVDVKQALPFVLPEEKENKGKTKGGKKGKGEVMNLWRDVSAEPLMTGQWLDYTAYRKEVENRVIQVLTAQLKARNPLRFGNLGDEEEIPY

SEQ ID NO: 61692 - protein, 1563 aa, Unknown
  Microbial Source -  Accession No. Ga116160_1008286
MSITNKPSVTPRAYTLRLRRAPGECVLCRKNDCNCWRENLWQTHEAVNKGAKAFGDWLLTLRGGLEHTLADNKVKGGKGKPDRDPTDDERKARRILLALSWLSVESKIGAPPEFIVASGQDVAKNRNGKVFRALEEILKTRRMAKKNIEEWKNDCSASLSAAIRKDAVWVNRSKAFDRAVKSIGASLTREEAWDMLERFFGSRVAYLTPIQSFENESSDAAEQEEKGKDLIQKAGQWLSSRFGAGKGADFRRMANVYNMIARWADKAHADMDGNQAINSLASALSIFTPASNNLKGVLDLISGPGYKSATRNLLSQFSDKTSVSRQDLFNLRDKAKNDARKCNQRSGSKGQRPYSEAILKNVESVCGFTYLQEKGPARHSEFAVMLDHAARRVSLAHTWIKRAEAERSKFEEDAKKANQVSKAAKNWLDLFCIERSVMSSALEQYRIRRRAVDGWKEVVAAWGKRSCNNLNDRIAEARALQEMDKFGDIQLFEALAEDDAVCVWHEDGDATKAPAHQQLIDYVLATEAEFKKRHFKVPAYCHSDSLVHPVFCDFGNSRWDIDFSIREAASCLEKAQTACTNKQAVVDKIEKIIKKPSGKVEKKSRLIEKLKKAKSEYEEARRELVRLNSKRGMTMTLFNGSDVKKTALGWQSKRLAADLALHTDDDSTNNIRVSRANRLGRAASNVIGSDGVKISGLFEQADWNGRLQAPRKQLEDIGKRVAKYGWDIKAQKMRDNLQWLVSFSAKLQPNGPWCDFASANDLKLDQKNGEIIIASQNSKNDWRGLAYPFWHSSNEKGRKGMAKHNLSRLSGLRVLSVDLGHRYAAACAVWEAINTKELKKVCRAAQHDAPKASDLYLHLKQKVKKEKNGNLVEMNKITVYRRIGAETLSDGMQHPAPWARLDRQFLIKLQGEEEGIREASNEEVWKVNQLESELGRTAPVIDRLVKAGWGQSDRQKTRLNALHNLGWTPASGAEVSDRTDENECEVCKPSLSVDELMSSAVRTMRLALKRHGDRARIAFAMSAECKPMPGDRRYFFTEAKELSVNDDQATRGNKHIEFIQDALMLWHGLASLRGWRDDVAKQLWDNYIANLSGYKAIKEISEDVSDAERKKKQKENREKLHDVAEALVKDARLRRVLHNVWKKRWEQDDKWWKERLRWLKDWILPRGQAANGPAIRKVGGLSLTRLATLTEFRRKVQVGFYMRLKPDGTSVEIKERFGQRTLDALENLREQRVKQLASRLTEAALGIGRMKRFRGEKDAKRPRERVDKPCHAIVIEDLTHYRPEETRTRRENRQIMTWSSSRVKKYLSEACQLHGLHLREVPAGYTSRQDSRTGAPGIRCQDISVKEFMRSYFWRKQVKNAQEKLAEDKGNSRERYLCKLAAMWTDKAAVGWEKGGNVRVPLKGGEIFVSADRRSPAAKGIQADLNAAANIGLRALTDPDWPGKWWYVPCDPASFKPVRDKVGGCAAVNPDTTLWQSAQVQSCDTDNNKKKQGKKDARNANGVVNLWRDISSSPLECIGSGEWKEYAAYQNDVQCRVIRILEEQIKERGWHLHDGSKEDEIPF

SEQ ID NO: 61693 - protein, 1570 aa, Unknown
  Microbial Source - Accession No.  Ga0116161_1004008
MMMSQKEKPATTQRAYTLRLRGVNPNDNSWRHALWQTHEAVNKGAKVFGDWLLTLRGGLDHSLVAADNSDRIPTDEERKARRILLALSWLSVESERGAPEKYIVASGKEASTDRDIKVIAALEEILKKRKLSDDEIKGWIDDCKASLSAAIRDDAVWVNRSKAFDDARVGRASFRSHAVWVNRSKAFDDAVNVKRIGDSLTREEVWDMLDYFFVSAEAYLKPIKISGDESTDTEKEEKAKDLVQKAGQWLSGRFGSGKGADFPRMAKVYEKIVQWADQAEADTAGGEAISNLVEALKEFKPASEDLDGVLGLISGRGYKSATRNYLQQIHTKSNITKEDLDNLKKKADEDRKKCLGKSGSKGQRPYADAILDDVERDCVFTYRVAENGEHVSVLDYSKYKEGCKWGTSSHQEFSVMLDHAARRVSLAHTWIKRAEAERRKFEEDAKKKDFVPKSASKWLDQFCEERSEASGALEPYRIRRKALDGWKDVVEAWSDKSCKTNTDRIEAARALQHQIDKFGDIQLFEALAADDARCVWHKDGNETASPDPQPLIDYVLAAEAEFNKQRFKVPAYRHPDALLHPVFCDFGNSRWSIDFSIREATTELNKAKKKLQKTEEAFTKATNVFVTDRENGKKREKLEKAKKELTDARQEVKRLSSARRLSMTLWTGIVLENKFPLCWQSKRLVQDLALSQKEQKCEATEVTRADRFGRAASNVTKSDDVEISGLFEQKDWNGRLQAPRQQLEAIAKVRDNDSLPTEERDRRICKMKDRIRWLVTFSAKLQPMGPWCDFAEKHRELELKIDPQYWPHAEENKKRKGQARLILSRLPGLRVLSVDLGHRYAAACAVWETVDSRQVEDACKDANHERPKSEDLYLHLTKRKNAGNDVEKTIIYRRIGADNLPNGTPHPAPWARLDRQFLIKLQGEEEGARMASDEEIWAVHQMEAAFGRSVLLIDRLVASGWGSSDEQKARLEKLKGLGWTPAKQPSSNYESDLDQGEFFKPSLSIDELMYSAVRMMRLALKRHGDRARIAFAMTAEYKTMPGDRRYYFAESKELSVEDNQEVRDSKRVEFIRDALVLWYDLAYSQGWRDNKARQLWDEYIAKLPEYGAFDEKIEESAAQGDKKRNEEIKEKLNNVPRVLANNESLRKDLHDAWQCRWEEDDDQWKKQLRWFKDWILPRGKAAKDPAIRGVGGLSLTRLATLTEFRRKVQVGFFTRLRPDGTRAETKEGFGQSTLDALENLREQRVKQLTSRIVEAALGVGRVKRPAGGKDPKRPDKRVDEPCHAIIIENLTNYRPEETRTRRENRQLMSWSSSKVQKYLSEACQLHGLHLREVSASYTSRQDSRTGAPGMRCQDVPVAEFMRSPFWRKQVKQAQENVSKNKGNKRERYLCDLNEMWGHKQPADWKEAGDVRIPLNGGEIFVSADSTSPAAKGLQADLNAAANIGLRALIEPDWEGKWWYVPCDAAGLPVKDHVEGSQVSGLNQALRQPEQAQTNEANTETKKRKSGRGKSREVINLWHDISSSELNDREWKDYNAYWNGVQYRVVSNLNQQMNGRNKKRQVDLGDDDVPF

SEQ ID NO: 61694 - protein, 1519 aa, Unknown
  Microbial Source -  Accession No. Ga116167_1006930
MPQQDNPPVTQRAYTLRLRGADPSDISWRNALWQTHEAVNKGAKAFGDWLLTLRGGLDHTLADAKVKGGKGNPDRDPTDEERKVRRILLALSWLSVESKLGAPQNYIIASGTEAAEDRNGKVVAALEEILKSRNLAENEIDKWKKDCSASLSAAIRDDAVWVNRSRAFDDAVESVGCSLTREEVWDMLERFFGSRAAYLAPAKVTEDESSEEEQEEKAKDLVQKAGQWLSSRFGTGKGADFFRMAAVYGKIAAWAVNAQAGTTGNQAINKLAADLSEFTPASNDLKGVLGLISGPGYKSATRNLLTQIDDKPIVTQEDLKKLNKTAAADRGKCETNTGSKGQRAYSDAILKDVESVCGFTYRVDENGNAVSVSNYSLYGDDYNWGSARHSEFAVILDHAARRVSLAHTWIKRAEAERRRFEDDAQRMANVPGPVKAWLDSFCSERSATSGALEPYRIRRRAVDGWKEVVTAWSKSSCSTSADRIAAARALQDDPEIDKFGDIQLFEALAEDDAVCVWHKEGDAAKAPDPQPLIDYALAAEAEFKKRHFKVPAYRHPDALLHPIFCDFGKSRWDICFDVHKNAQTPFPRALCLTLWTGSGMEPVPLCWQSKRLACDLALGNNPRNAGASAVTRADRLGRAASNVTKNDQVKISGLFEQEDWNGRLQAPRQQLEEIARYVEKHGWDQKAKKMRDGIQWLVTFSAKLQPQGPWLDYAKTNVLKLDQKNGDIVVAPSNSKNEWRGLAYPFWHSDNQDGRKGLAKHCLSRLPGLRVLSVDLGHRYAAACAVWEAVEKGDFEKECSKAKEKGAEIHYGPDRYKPEVAIYAHLVWPEKASNSATKKAKTEGRDKFHPVTIYRRIGADTLPDGPPHPAPWARLDRQFLIKLQGEEEEVREASNEEIWKVHQLESELGRRVPLIDRLVNAGWGWSDKQKARLEALCAWGWKRASEAGFSGGTDADEGEVRRPSLSVDELMSSAVRTMRLALKHHGDRARIAHYLITDEKTKPGGVKEKLDENGRVELLQDALIMWHDLFSSRGWRDDAAGQLWNDYVAKLSGYNAPEETDEESSGPERRKKQKENREKLYDAAKALAQDVTLRKALHDAWKKRWKDDDERWKKQLRWFKDWVLPRGKHASDPAIRKVGGLSLPRLATLTEFRRKVQVGFFTRLQPDGTRAETKEQFGQSALDALEHLREQRVKQLASRIAEAALGIGRMRRPMEGKDPKRPDVRVDAPCHAIVIEDLTHYRPEETRTRRENRQLMTWSSSKVKKYLAEACQLHGLHLREVSASYTSRQDSRTGAPGIRCQDVPVDEFMRSPFWRKQVKQAEAKQAENKGDARDRFLCNLNAMWKDKTVADWEKAGVIRIPLNGGEIFVSADCTSPAAKGLQADLNAAANIGLRALTDPDWPGKWWYVPCDPASFKPIKDKVEGSKAVNPDKPLPHSTQKQDGNAAKDTKKRGNKGAGKSKEVVNLWCDISSFPLQDKSREWKEYAAYQNEVQCRILEEQIKGRDKQPHEGSKEDDISF

SEQ ID NO: 61695 - protein, 1558 aa, Unknown
  Microbial Source -  Accession No. Ga00116184_1002336
MTKKNKPSVTQRAYTLRLRRAPGECVFCQKNDCHCWNEHLWKTHEAVNKGAKAFGDWLLTLRGGLDHTLADAKVKGGKGKPDRDPTDEERKARRVLLALSWLSVESKLGAPPEFIVASGHDVAKNGNEKVFEALEEILKSRKIAKNEIKEWKDNCSASLGAAIQEDDAVWVNRSKAFDKAKVNDLKGLTRKYAQNAIMHFFGPEHDYFALPGGGNDDDDNDDADSSRLVANEGPEYRTLARQWISTNFGTGKKSNNERIIEILRKLVASDLNRFACHPKSEIIKEMCKIVNCSSPDLDKLCVAIGWITGRKSTGRLAIENLPACPNKTDIEKMKQKLADEADEKDSASGMREVPSWIALLRLSIEQACSIPFVGKRNHIGEFAVMLDHAARRVSIAHSWIKRAEAERRKFEVETKKVNIVPVAAKKWLDLFCMERTVMSGALAQYRIRRRAVNGWKEVVAAWGKSSCINLDDRIAVARALQFDPEIKIDKIGDIQLFEALAEDDAACVWHEEGDATKATAHQPLIDYVIATEAEFKKRHFKVPAYCHPDAFMHPIFCDFGNSRWDIDFSVREAAIYLEKAKTRCTKKQAVVNKVELILRKSSGNIAKEDQLIDKLKTAKRELEDAERELERLNSKHGMTMTLFDGKAVKKTELAWRSKRLAADLALHTDDDSTKLIEVSRANRLGRAASNVTGRDGVKISGLFEQADWNGRLQAPRKQLEAIAKRVADNRWDTKAKKMRDSLQWLVSFSAKLQPNGPWCDFASANNIKLDQKNGEIILASQNSKNDWRGLAYPFWHSSNEEGRKGMAKHNLSRLAGLRVLSVDLGHRYAAACAVWEAISTDKVRKACRAAGHEPPKASDLYLHLKQKVKKVEKGGQTEVNKTTIYRRIGADKLPNGMPHSAPWARLDRQFLIRLQGEEQGVREASNKEIWEVHQLEAEIGRTAPIIDQLVKGGWGESEKQKKRLKVLRTLGWKPINKDVGDVSSPSLSIDEMMFFAVRTMRLGLKRHADRARIAFAMTAAYNTMPGGRRYYFNEPKELSANDNKAERDNKRVEFIQDALMLWHSLAFSNGWQDDAASQLWDGLIAKLPGYKIPEEIGEEDSGAERRKKMKENRKNLYDVAVALAKDAKLRKALHEAWKKRWEGDDKQWQKRLRWFKDWILPRGKAAQDSAIRKVGGLSLTRLATLTEFRRKVQVGFFTRLKPDGTSEKNKERFGQRTLDALENMREQRVKQLASRIAESALGIGRMKRFRGEKDVKRPRERVDEPCHAIVIENLTQYRPKETRTRRENCLLMTWSSSKVKKYLTESCQLHGIHLREVSASYTSLQDSRTGSPGIRCQDLSVKEFMRSKYWRKQVEQAEKKPAEGKGDSRMRFLCELNKRWKDKRGEWEKAGVIRIPLKGGEIFVSAESKSPAAMGLQADLNAAANIGLRALTDPDWPGKWWYVPCDRASFKPVREKVDGSAAVNPDKQLRQPAHVHSSDIDKIITKRGRKNVGKANGIVNLWRDISSSSLECVKSGEWKEIAAYQNDVQCRVIRNIKEKKKGRDKQPQKGSKEADIPF

SEQ ID NO: 61696 - protein, 1102 aa, Unknown
  Microbial Source -  Accession No. Ga0116185_1015740
MPKQDKPPVTQRAYTLRLRGADPNDQSWSDALWQTHEAVNKGAKEFGDWLLTLRGGLDHTLADTKVKGGKGKPDRDPTDEERKARRILLALSWLSVESSLGAPADFIIASGAEASEDRNGKVVAALEDILKTRGVGQNEIKNWKIDCSASLSAAIRDDAVWVNRSKAFDNAVNSIGCSLTREEAWDMLERFLGSRDAYLTPVKGSEDESSATEQEEKAKDLVQKAGQWLSSRFGTGKGADFSRMAAEYGKIAAWADAHSPNKPGTDAIASLATALSEFTPASNDLQGVLGLISGPGYKSATRNLLTQIAAKTIVTQEDLKKLNETAAADKGKCETNTGSKGQRAYSDAILKDVESVCGFTYRVDENGNAVSVSNYSLYGDDYNWGSARHSEFAVILDHAARRVSLAHTWIKRAEAERRRFEEDAQRMANVPGPVKEWLDSFCLERSGMSGALEPYRIRRRALDGWKEVVAAWGKNSCSTSADRIAAARALQDDPEIDKFGDIQLFEALAEDDAVCVWHKDGDAAKAPDPQPLIDYAFAAEAEFKKRRFKVPAYRHPDALLHPIFCDFGKSRWGICFDVHKNVQTPFPRALCLTLWTGSEMKPVPLCWQSKRLACDLALGNNARNAGASAVTRANRLGRAASNVTKNDEVKIAGLFEQADWNGRLQAPRQQFEAIAAVRDNLSLSAQEREQRMSGMTDRIRWLVTFSARLQPQGPWCEFAEQNQLRIDPQYWPHADANKSRKGQARLILSRLPGLRVLSVDLGHRYAAACAVWEAISTEEARSACQAAGHEEPKESDLYLHLKKTAKKQKKTREVVVEETTIYRRIGADTLPDGVPHPAPWARLDRQFLIRLQGEEEGVREASNEEIWAIHQLEAALGRPVPFIDCLVASGWGGSDKQKARLKELKHLGWKPAEKPESGDESVAGEESNAYRPSLSVDELMSSAVRTMRLALKRHGDRARIAHYLITDEKTKPGGTKEKLDENGRVDLLQDALVMWHDLFSSRGWRDDAARQLWDEHVAKLSGYKAPEEIGEEFSGPERKKKQKENREKLHDVAKAMAQDVTIREALHDAWKKRWKDDDERWKKQLRWFKDWVLPRGKHASDP

SEQ ID NO: 61697 - protein, 1123 aa, Unknown
  Microbial Source -  Accession No. Ga0116188_1022712
GRAFGDWLLTLRGGIAHELADTPVKGKKDITDELRKNRRILLALSWLSVESRRGAPDKFIVAGGEEPAGSRNEKVLQALKEILKRRGLGAEESESWMSDCRASLSAAIRDDAVWVNRSAAFDDAQVRIGASLTREDIWDMLDPFFGSREAYLTPAKKKKEDEDSSEGTGEEKAKDLVQKAGQWLSSRFGTGKGANFAAMAEVYSKISEWAGTAQEGVSGKEGIKNLADALAAFSPVSQNLEGVLKLISGPGYKSATRNLLGELDSLPVVSRDHLSALHEKAAEDTVKCKESTGTKGRRPYADAILNDVEKRCGFTYLTDSDNRSVSILDTSEFPSDYKWGTARHSEFAVILDHAARRISVAHSWIKLAEAERDRCEEDAAKVYDLPDKVKEWLDTFCSNRSDISGAQGEGYRIRRKAIEGWKEVVASWGRSSCITAEDRVAAARALQDDPEIDKFGDIQLFEILAQDEALCVWHKDGDVAKSPDAQMLIDYVLASDAESKKRRFKVPAYRHPDALLHPIFCDFGNSRWDITYDIHGARGKKKAKRGSKKEEAMPRGVAMKLWTGSDVLSVSLRWQSKKLAADLALDQEAEEVTDTAAVSRADRLGRAAAGIDRGAGVTIAGLFEEAHWNGRLQAPRQQLEAIAAVRDNQKLSSEERERRIAFMKDRIRWLVTFSAKLRPQGPWHSYAPTQGLQSDPKYWPHSEINKKRKGQAKLILSRLPGLRILSVDLGHRFAAACAVWETMSSEAIQEACRLANHQLPAPADLYLHLKRTVQKNLIDGEKTVEESTVYRRIGADRLPDGTAHPAPWARLDRQFLIKLQGEEKVREASNEEVWQVHLMESALGLSFPLIDRLVYAGWGGTEKQAARLEALREKGWKPTGTPADQDEEGGGYKPSLAVDELMFSAVRTLRLALKYHGDRARIAFALTADYKPMPGDTRYYFSEAKDRSSGADAAEREAKHKDYLLDMLLLWHDLAFSRKWRDEEAKELWNLHIAALPGYQAPAAPIQEEAGQGRKKAREEARAKMTPAAEALLADGTLREKLHGLWKERWEKDDAQWKKHLRWMKDGILPRGGRAATPSIRYVGGLSLTRLATLTEFRRKVQVGFYTRLFPSGEKREIKEAFG

SEQ ID NO: 61698 - protein, 1240 aa, Unknown
  Microbial Source -  Accession No. Ga0116210_1003377
MKIKGYRLHKERIKFTSGTTIRSIKLPIKEFSLNEDKKELILKIKKQVKNDDLLLKGDVNLNDYAQKGFRGNPSYNFFDFWVDSLRAGVIWKKTTNELIDFVNGKLSKKDIIGEILIKASDKFLKYFDIANQDLKNFFKLSEVRANKNKQSLSRSLVSYLKQDYKKKKDKYDYEIINSDAQNLINFIVNSFFDNQSLLKLKGPQKQNQFWLKNFGIDKTKLKQFRPQGELGNISFVIVPQLISIDKDINIVDLIEKRIHFLERLNLNNDNEIKSILGLENNFSALSNYLGIIFKKLYQGEIEEIFQALVFIYKDLEDYKNVAFKSLNFLKEKAKLLSPEPSLEFISNWADYRSLLGGKIESWLSNYLRRKKEINQQINDFFNGLDLTKKFLIENKNYKKELKDNDLDSILKIIKEINQFGNKDLNNKKNYEIFDSFLSILKSDLNLFYQKYLIDEKNEIKVDEFSPFEAIYKKIYKPVSFYGEIKRENNDKNLRLVLPIIKTGLEFSKLMINELTENFSFNDDDDAEIFFRKLLNFYHQKILTKSINSNDFKNFFIDILVHYISEEDKKNIFKKNRVFYKSDYSKGTQSLFKLINTEFSQEFKKLIFKIKDFLASFENDYILINKDLLLDWIETFKNLSSILIKFSINNDFDSKIFEPLLKNYLKIKIYYDVFNPPDFDKNLFTKLWQQFFLSEFKGAAILYSKKTYLARYVSQFIGSENKIKIFFYSSNQDLLEKINDFENIDNDVSKNLVNKRKYLISFDENLKLSTKRKLETDVCLIKLSKNLNQFKKVYIKKESFDNLFEITSSYYQLQFLDRLFYKPKDWRNVDIKLSEWNLILEQDYEINWKLEANKAEFIKKENSKKNKLYINIPFEISSKNLVIKFKQLDNNRFAYPICGIDVGEYGLAYCLIKVGGNQTNIIDKGFFEDKNIANIKDKFAKIQERSRKGIFNETDSTIVQVRENAIGALRNQIHDLVVKYNASPVYEYSISNFETGSGRTTKIYNSVKRSDVFEEGSEVSVFLKTQIWGIKKTIGRNVSSYASSYTCINCKRSLYELNFQKKHLENGEVIIVVQKRQGNIIYFQINNNLIICGYSDKNKFVNNYQLKTRQDLDDFNKALKDFTRPPVKSNSEVLVKFANDLTMKKLKKEDKELSFIDVFRKRRGNSSIFVCPFDDCHFVADADIQAAFIMAIRGYIKFLKGANNNNQNNDKNRQKIDYFKETLIFLKKLQLQEDIFYPSID

SEQ ID NO: 61699 - protein, 663 aa, Unknown
  Microbial Source -  Accession No. Ga0123519_10000481
MGRNRGADRAAMGDHARGRDAVGDLAQLRLTRRSAPRSADQRRIAMATRNCRYGLLAPVEGRDEVMRQLRVAHEVYNTLVQYERERRKAVADATRETDAEVARLEAEVEGLLSRLADLRAAIQAARAGGGDNARLAEAQAEARECRRLLGEAKGALRETKRVARQNPALRERLEAIKAEHHRRQLALYHEVVEVGKRLYWPSWNDTKAAVEQAAKKTKNGDLRFRRWTGEGSLYTQVQGKQPVCETATSRWVRIDPVPPEAHDPATPRGERRRLCRTRFYLRIGSTGPREDPVFAVFPMVYHRPLPEGAVICGARIVRRKNADREYWQAVVTVDLPDEAAQKSGPRVCALDIGWRDRRPGGSDEPPPLRVAAWYDGDRTGEVLVDPSVFERCAKADAIRSTRDRMLDDLRAWLCEARKDLPEHLAEALAGCGLWRAAGKFARLRGLLSSGDVPAEVRDRFLAWYHRDRHLWQYEHGMRLNAIRDRDNAYRIAAKRFAQEYDVLIVEATGTPQKERDPKAPAAMDLRPLIKEPDPEDAPPRDQQRERKENKAHHQRFIAAAGTFRRYLLEAAAKYGTRVVMVPCEQTTLECWVCGAKYEFDRWPLMHECESCGTTWDQDQNAARNLFARGAVAAKGPGPLEVQGKPRLPRWHKRHKAYREGGAG

SEQ ID NO: 61700 - protein, 792 aa, Unknown
  Microbial Source -  Accession No. Ga012519_10002165
MATKSFEAKIVCKPDEKYTAEQKKQFLWFTHQVFNDGVRKVIPYVFKMKRGELGPEFQAIYYAITSSQDAIGKLEAVINPDWTSGKIGKSDPNKWKELLKYQELEKGFRQRLKEEGIKSTKKFRKELEDEKKKLAKEIGQKDIWADAAAILRNKNLLLFNRDELLPNLPSEFRRKIYEMTIQLIHGHQELVANWEDEHAEWLIEKDKWEEEHPEYMNVRPIFEKFEKEQGKVKGSRIRWLAYLDFLSSKPELANWRGKAKETIPLTKEERAGFRKPGQHFAAFFNKNPELQELDRLHKEYQEKFARTQSKRTPHPDGFKHRPTFTLPDAMRHPVWYSFKGATDPTKGSTYRNLDLENCTLDLKVLTAMEGEGRNPGGMIQYAFEPDERIKGFRYVGTTEKGKRAKGYIYYDPILEKERPAKIQGIKLVFRPPRPDGTAYLIFSCQIEDEKPKIKIWKDKEEESPGEITKRKKTEVYPPELITLAIDFGQRHLGAITICKNNNGRPEPIRFIPAYPKRRKDRESKPVSAWLAKIPGLTFNAVGMHEKEISAGMSRRFQDPKSIRQAGEKEGRKSKGQHIPETETPWAHLREHIANMKEDHYKKAANLIIRTALQNGAQVILIENLRNYRPMLERTNLENRRRMQWAVRQTAKFLEDTARPLGLIVRQVSSAYTSRFCSSCGHPGARVSLPGQKNWEKFYAEKYGKERKMIAVAGGQFFCCPACKKIINADINASLNMHKVFYQNFIWPGKIDKKDTKNFIWQGKNYNWDQIADDVQSFLDQKAGIKKEDDIPY

SEQ ID NO: 61701 - protein, 1481 aa, Unknown
  Microbial Source -  Accession No. Ga0123519_10002912
MPKQNKPPVTQRAYTLRLRGTDLNDQSWRDALWKTHEAINKGAKAFGDRLLTLRGGLDHSLVDTKVKGGKGNPDRDPTDEERKTRRILLALSWLSVESKLGAPENFIVASGEESAQDRNNKVIAALEEILKSRGVAENEIDQWKKDCSASLSAAIREDAVWVNRSKAFDEAVKSVAFSLTRDEVWDMLERFFKSPTAYLDPAKGSEHEYSETEKEEKAKDIVQNAGQWLSSRFGTGKGADFSRMAEVYEKIAVWAGNAQAGTTWNEAIRNLAAALSKFSPKTNDLQGVDGLISGTGHKSRTKNLLKVLAAKSEVTIQDLEILKNNAAEDARKCFQKKGSKGHLPYSDAILRDVESVCGFTYLQNGGPARHFEFAVMLGHAARRVSLAHTWIKRAEAERRRFEEDAKKMDNVPVKTKEWLDEFIRERSGFSGALEPYQIRRRAVDGWKEVVAAWSKAVCKTAEDRIAAARALQDDPEIDKFGDIQLFEALAADDALCVWHNEGNATNAPDPQPLIDYVLAAEAEFKKRHFKVPAYRHPDPLLHPVFCDFGKSSWDIKFAVHSFSKKRGRSNNRMTESNDLHAFSMTLWTGVRMQPVSLYWQSKRLARDLAFGKYVRNEGAIAVTRADRLGRAASNTSNNDLVTIAGLFEQEYWNGRLEAPRRQLEAIARYVEKHGWDDQAEKMRDQIKWFVTFSAKLQPQGPWCAFAQKLRLSINPQYWPFADANKKRKAHAKLILSRLPGLRVLSVDLGHRYAAACAVWEALSSEEVLQACRAVGHEDPKESDLYLHLKKKVTKQKKGNPVEVEETTIYRRIGADKLPDGTPHPAPWARLDRQFLIKLQGEEEGVRQASNEEIWQVHQLEAALGRSKPLINRLISSGWGITKNQQSRIEALKKLGWCPPEQPESGDVSDADEEEITYKPPLSVDELMSSAVRTMRLALKRHGDRARIAHYLITDEKTKPGGVKEKLDANGRTEMLQDALVLWHDLFSSRSWRDDAAKQLWDEHIIKLTGDKLPEEIGEDASESERGKKKKENREKLHDAAKALAEDESLRKTLHDLWKTRWEEDDRQWKKHLRWFSDWVLPRGKAADDPAIRKVGGLSLTRLATLTEFRRKVQVGFFTRLHPDGTRAETKEQFGLSTLDALERMREQRVKQLASRIAEAALGIGSQDKRHWEGGNRPRRRINDPRFAPCHAVVIEDLTHYRPEETRTRRENRQLMTWSSSKVKKYLAEACQLYGLHFREIFAGYTSVQDSRTGAPGIRCQDVPVKEFMRSPFWRKQVKQAETKLSENKGDARERFLCSLNAMWKDKAVTDWERAGVVRLPLKGGEVFVSADPLSPAARGLQADLNAAANIGLRALTDSDWPGKWWYVPCESSSLRPVKEKVEGSPAVNPTQALPQSAQKQSDGAGAKKKRKGSGTGKPKEVVNLWRDVSSSPLDDPNAGEWKEYTAYQNEVQWRVVRILEEELKGRFQRLYEGAKEDGIPF

SEQ ID NO: 61702 - protein, 1338 aa, Unknown
  Microbial Source -  Accession No.  Ga0123519_10003344
MNKKSSNSTGYRLHKDRILFSGGEIMRTIKYPLVVEKNNLNSEEIVEKIRQAIINDDRVIRSDINLNDYIEYTKKGNRLYTLIDFWQDCLRAGVIWQPSTSFLLYLINKLYSKPKAIELIENAKPDISRFFDVDKFSKCFILPGEIREGKILKTFKRELIEALKGEFKKGKKEKIKDEDDYLEKFVEKDARKLIREIADCFFSNDILVTHDLKEGKKEYQDRLWEEKFGIKKGKLLENFKLPDHLRNFKNISFFIIPELSDKSKNFDELIELRRKWLLERKICVREDGDYLENEKKLDEELRNLVGLSDNCNPLSNFLGTVFCELLVPNNLNEDNALEKFYDVFTIVEPKIAELNIKDQIMGSLEFLRLRAKQLGSPNLVNFSKSQNLKANESIKLDGWSLYRQNFGSKMQSWFTSYIERNKLLEDSLKNFKEKIKKAQNFIKNLKNISEEPQQEEEAQQEKEEIVELFEKIFSSLEKVNRENFEVFDSLLSSLRKRLNFFYQQYLYNEAKEGDDVKKHKILGPIFKNIEKPIAFYGETQRKKNEKFVEDTIPILEEGTVFLTTLISNLLDSFSPKQVFPDVRKKDETEEIIYRKELQFFWNKLKDLAVNSKEFEKEYQDIIESAVDESELSKLKELFVNKKKNGSKYNKYTFYKSKYTKGSIEEIKLKGSKEEYLLRFEKLIKSLTNFLTQFNRNKLLQDKDLLLDWVELAKNIVSVLIRFSTNTEFSLNEIKAQSQFKKAKNYLELFKLKKAKKKEFGFIIQSFILSEIKGAATLYSKRKYIASYSVQIVGSNNKFKLFYQPLDSSINISGGPKDFVTKKHKYLIVFQDLKNVKNKDATENRINLLRLNKERKIPLVAYKDDLVSKSLLLSSSPYQLQFLDKYLYRPRGWENIDIKLNEWSFVVEEAYDIEWDLNSKTPKLIPSPKSNRNKLYLAIPFTLKGNVKEPPLDKIVLKSETKKDHSRDKNRLNYPILGVDVGEYGVAWCLTKFDYNQDFSLRDIDIQGKGFIEDRNIGKIKDYFAEIQQKSRKGAYDEDDTTIAKVRENAIGKLRNAIHSILTGSLEGASPVYEDAISNFETGSGKTIKIYNSVKRADTEFKSEADKAEHSLVWGKKDRNQETKYIGRNVSAYASSYTCVNCLHTLFKVKKEDLSNIKILEKDGRIVTMSSPYGPDKKVRGYLSEKEKYEIGYQFKESEEDLKAFRKIVRDFARPPVNKNSEVLEKYAKEILAGNKIEEFRKKRGNSAIFVCPFCQFKADADIQAAFMMAMRGYLRFSGIVPSKENSKNNPQESEDKSLKNSKKQSETGDTFLTKTAEYLQQLRFEIKEKIKEAVKVDF

SEQ ID NO: 61703 - protein, 1520 aa, Unknown
  Microbial Source -  Accession No. Ga0123519_10003852
MAYQNGKEQPTVTNQRAYTLRLSGTNDQDSIWRNRLWHTHEAVNKGAKTFGDWLLTMRGGLCHTLAEADVPGKGNKPARHPTPQEIRSRRVVLALSWLSVESQHGAPERHLVSHDLDIATGERKNWKTVEALREILHGRCLCKELIDEWANDCRDSLSATIREDAVWVNRSKAFDLAAKKIGASLTREELWDFLQPFFANKHGYLQMDTVAGVTNGDSETDAEEAKEDSSEEKAKDLSQKAGQWLSSRFGTGTGADFSRFSKVYEVLAARCGSVAVGVSGVEAIRILAGTLADFSPGSNDIEGMLGLMSGPGYKSATRNILQKINTLQTVSQQDLDRLREASEKDALQSKQKVGGKGSRPYANAILQDVEAACGICYAGTGESPARHWQYAVILDHAARRVSMAHSWIKRAEEQRSKFEIEKDKLDHVPKDALAWLDAFCARRSSESGASDAYRIRRSAVDGWKQVVAAWAALPPKPENQGSELLSDAESARIQAARELQDTVEKFGDIQLFEALSLTGAKCVWQPDGRPDAQPLLDYVAGTDAISKKQRFKVPAYRHPDALLHPVFCDFGNSRWNINYAIHRAPEKLTPAQQLLEKKKAEIDKAELTLAKAGDAAKQANISEKINGLRAAFIQQQEKVAWLNSRHAMTMSLWDGTHIEDTPLIWQSKRFGSDIGQPVEAQPLPVSRADRFGRAVALAQDNVPVIPSGLFDLSDWNGRLQAPRRQLEAIAAIRDSAKLSVNEKQQLVAKRIQSIRWLLTFSAKLQSHGPFIAYAAQHGFDWRYGAHGPENKSRQGLAKLILCRLPGLRILSVDLGHRYAAACAVWETLNAGQIQKACLDAGKEAPGPCTLYLHLKQIANGKEKKTIFRRIAADTLPDGSPHPAPWARLDRQFLIKLQGEDRDARLATSEEIAAVEQMENELGVVRQLKRKGRELLVDELMSDALRTLRLGLRRHGVRARIAFNLTANKRIRPGGKEEVLDQEGRVLLLTETLLAWYELYTAERWTDEPARELWNRHIQPLLGATILQNTVNQEDTPSAAKRRKLREETSGKLKHVAEEIAKNDSLCRQLHVLWSAQWQTEDVIWRTRLRMMRRWLLPRGVKRNAQLRISIRDVGGLSLTRIASFKSLYQVQKAYQMRPHPEDPRLNIPERGDSRLENFGQRVLDAMERMRENRVKQLASRIAEAALGIGGETGISSKDGSQKKRPTERSSDPRFAPCHAVVIEDLTHYRPDETQTRRENRQLMSWSSSKVKKYLGEACELNGLYLREVSPAYTSRQDSRTGAPGLRCNDVTVVEFNNSPFWRKQVGAAEKNQKEGNKGDARERYLLSIEEGIRGAANDRDIFRIPVKGGEIFVSACITDGGNNAKKNAPPGLQADLNAAANIGLRAIFDPDWEGRWWYIPCDAATLCPDAKKFIGCKAVDPTKPLRVVAEEGAISASGIGSKKSGRKKNAATDGTRIVNLWRDPSGAPIHRDVLRSPEWQDYAGYWNEVQHRVIRNLKTCYEQTSQQEDPFVSQDADKPF

SEQ ID NO: 61704 - protein, 1519 aa, Unknown
  Microbial Source - Accession No.  Ga0123519_10021143
MDLTQRAYTLRLEGVDPSDDSWREALWQTHEAVNIGAKVFGDWLLTFRGGLDHTLADKKVKGRGGKDVRVSSDEERRMRRIFLALSWLSVESRLGAPDKFIVATGEEDEETRNNKVIKAFEEILKKRGLSKKEIEEWKEDCKISLNSAIRKDAVWVNRSKAFDEACRDLKGALNRKEVWDFLGFFFLSPNAYLASEKSVDEEIIDSEQVDEEKDFVEKAGQWLSSRFGKGKGADFQRMAKIYKEIGSWANTARPGIGGKRAIEEMARRLSRKGFGPGLRNLNDILDLISGPGYKSATRNLLKKLSEKGTINRQDLYNLKTKAEMDAQKCEEKIGKKGHRKYADFILDKVERSSGITYFADKNGFNIPISDRNKFGTKILLGASRHREFAVMLDHAARRVCSTHTWIKRAEANRRKYEDDANKMKSIPSTIKEWLCDFCENRSAALGASVPYRIRRRAVEGWKEVVDAWSKDGCNTTEDRIASARRLQGELENFGDIQLFEALADEDASCVWHVDGDPKKAPSHQLLLDYVAAEEASFNMQRHKVPAYRHPDPLFHPVFCDFGNSRWSIKYSVHEAKKTRKDPWKEVDKRRREVEKAKNAAQRCSNDGEKKIKAEEKLRLAEMLLHEAERELEFLASPKRVCMKLWNGINLQEVQMLWRSKRLDKDLAIRCGNRGPHAIQVSRADRLGRAAVNASKSDSLQIAGPFEQRCWNGRLQAPREQLARIGRRVERHGWDKKSQMMKRDIKWLLTFSPKLRPLGPWLEYGGKEKIKERQEVEEKGGRGNDARLLLCRLPRLRVLSVDLGHRYAAACAVWETLGEEDFKREIKGRKVLCGGSSGECMYCHTLHRDREGKVLKTIYRRIGADTLPDGRPHPAPWARLDRQFLIKLQGEREGAREASVEEIWKVHELEARLGRTKPLIDRLVAAGWGQTPGQKKRLRILEGLGWKQTQGVVDVTKDNEMSYKPSLSVDELMFSTVRTLCLALGRHGDRARIAHALTADYKKMPGGQRYYFNRAEDASVGDDESVRHEKHVEYILDALLRWHDLFEAKGWQDEEARELWDKYIANLSCCLEVSEMDDSLTDAELKKRRKDFKERLRPVAEAIVKDGKLRKKIQQEWKRRWERDDEKWREDIRWFKHWIFPRKKQAGPSIYRMGGLSLTRLATMTEFRRKVQVGFFTRLHPDGTTGEIGEDFGRKVLEDLEVMREQRVKQLVSRLVEAALGIGSEDLSHWEGQKRPQQRIEDPRFSPCHAIIIEDLTHYRPDETRTRRENRQLMTWSSSKVKKYLAEACELHGLYLLEVPARYTSRQDSRTGAPGIRCSDVSVAEFKNSPYWRKEVARAKAKNEKNQGDARDRYLCELDAQLAGSGRLKNVRVPIAGGEIFVSADTGSPATKGIQADLNAAANIGLRALVDPDWPGKWWYVPCDSSSFKPINDRVKGCKVIDTQESLKEASPGLAVKGEKNSEKKRQRRAKHREVVNLWRDISAKPVSAAYGPWDEYSVYWNRVQDQVVKILRNNLALSK

SEQ ID NO: 61705 - protein, 1026 aa, Unknown
  Microbial Source -  Accession No. Ga0123519_10027137
LILEGKKQDNFWLNEFGIDKSIIQKTKPEGELKDITFVIIPELIVDSFNKEYEVDSLIEKRRVWLKKRFNKEKEIEKNLQLILGLSNNFNGFSNFLGKGLRAFQGGKILMIFEAMSKINPSIKNQENKEKVLEALNFLSDKSKFFPLRPSLNIVKSWADYRTFFGGKLQSWYSNGIRRKNELKVQVKEIYEFLTKAQDYLAAKISFNDENKRYARKELESINLKINRLKQFIENENFDISSEDRYLIFDTLLSSLRTQLNLYYQKYLSSEEDNIRENKDLKGIYQKIYKPIAFFGKATKRKNKKVIEETVPIIESGINNLFSLMKKLEKTFLPKNTFSKVKNKNEDEETNLRNLVDYYQNKVSHKMLNSLTFVNKLEEVMKSVIEENDWDKLHSNKYVFYKSEYQKGALELIPLKKGSWIDIFEKIILEMTSYLLTFDLTDLLKDKKILLDWIEIAKNTLAKLIKFNTCDVFTLDELNLDLRNFPKAMDYIKIFKITKVDKNELNFIVQSFILSELKGAATLFSKEKYLAKYNVQVINADKKFKLFYKPNDGFIEREVDRKNLLKPHQYFVALDKIEDKKIKEKANFLLITKEDIKPVFIKEENFSKLYKISSSFYQIQFLDKFIYMPEEFKDLGIRLSEWNFVLEREYKIDWDLCTKRPKMTFIENSKKNKLYLSIPFNVFYKSKKKDVSLSKVISNRLSYPILGIDVGEYGLAYLLAEFSDKKIKILKKGFIEDRNIANIKDKFAEIQLKARTGIFNEEDTTIARVRENAIGNLRNKVHYILTSDRGASIIYERSISNFETGSGRTTKIYDSVKRADTEFETEADKFIHNHVWGKNTKYVGRSLSAYGSSYICSKCHRSIYQFKKEDLREIKLLMREGNILTFLTPIGKVWGYSKDEKFKKDYQFKPTEKDFKEFIKILKDFARPPVGKNKTEVLEKFFLKDNDKKAKIDEFRKKRGASAIFICPFCGFIADADIQAAFVMAVRGYIRFKESQIKEENKSLILEKTINYLKEVQFKPEDIFLPF

SEQ ID NO: 61706 - protein, 387 aa, Unknown
  Microbial Source -  Accession No. Ga0063162_10057643
VETIKLCVKGVISPRDIGLEKLMHEYTVYKRVLIPRTKHAVREVIKDRSIVVYAQQKWELDKKINEYLKNLSFHPMPFHNQSVYIENGNGKFWIHFKTKEGEAVCHLHVPAKYKPLIEKSCGSGYATNPVLGQVELIEDEKYGWINCHITLRLPKPKPYEPKGWLGVDVGWNKLATSILATTNPHLCFNNPTVHGKLFKTRIIQLKYLLKDYARKRRAWKKWNFRLKQTVKYATGVVAKEIVTKAKKHKAGIVMENLTFQSQTKKWLIPRYKLMIAIKTLCEREGIPFKLVPPKHTSIKCPRCGYINNENRKGERFACQKCSYEADADITAAMNIAAIAVGLAPTVKEVRLYAEASGDVATPLSPMVDDLYEDEGKPSKIEMRWAKS

SEQ ID NO: 61707 - protein, 332 aa, Unknown
  Microbial Source -  Accession No. Ga0123519_10064432
MAIPVRCDKPGQKRLEKTNDGQVEVDLMICTHPYPRVVLATQDKSLGKGARTILAHLLENKDQSKNGYRQRYFEIKEDKLSHKWFLLVSYDFPASTPSLSKERIVGVDLGISCPLYVAINNGYARLGWRQFHALAARIRAIQNQTIRRRREILRGGKTIISDDRARSGHGLKRKLLPIEKLQGRIDRAYTTINHQFSSAVIKFAKDHGAGMIQIEDLDGLKEILSGTFLGERWRYSELQQFIKYKAKENGIEVKEVNPQYTSQRCSQCGYINEQFTFNYRQEQRQKLGKPVPFTCPECKYEANADYNAARNLATLDIEQLIMRQLDKQGIKN

SEQ ID NO: 61708 - protein, 975 aa, Unknown
  Microbial Source -  Accession No. Ga0124943_1106748
MKSLAQFQNLYALQKTLRFELKPEGHTRETFNRWLEEIEKEQASENENIVYQDLLRAKKYEKIKIILDEYHKDFIEQALAYANLTELEKYEELYRKSNRTSEEEEEFENTKESLRKQIANIFIKNPNKTVQERWKFLFSKKLIQNELIVWVKGNYELLSEKLKNEFPDESSIISTIEDFKYFTTYFRNYHENRKNLYSNEDKFSTIAHRLIHENLPKFIDNIAIYQKAKAVLNINEVEKELGLPEDTLDKIFSLDFFSKALTQKGIDQYNYFLGGKTENEVKKIKGLNEFINLYNQQQQDKNQRLPFLKVLYKLPLFERTSTSFRFEPIENDRDLIERIGKFYYNDLKQYRDDSQGDTTDILSGINTLLRHVHDYRDGLYVNGGITLTQISQKIFGSWSYINNALAYFYDTYIDASGVDHQGERKPKKQKQIQEKTKWLKQKQFPVILVEKALSEYKSIETNEDLKTRISDTTLCDFFKRCGNDDNGQDLFDRIEARLREKNEEGYSLEDLLKKEFTTERKLMQDKTKTLLIKNFLDVIQGDKDDITAGLLHFVKCLIPRTEISEKNELFYSGMEKYLNILSEVTPLYNKARNYLTQKPYSIEKVKLNFENSTLLDGWDENEESDNSCVLLRKRGYYYLGIMNKKHNMIFDRKIYPKATEGEAYYEKMIYKLLPGAYKMLPKVFFSEKNIDYFKPSEEILRIRNTASYSKNGQPQEGYQKASFSIEDCRKYIDFFKKCIANHWDWQKFNFNFSPTEYYQSIDEFYREIERQGYKIDFVKIPESYINQLIKENKLYLFKIYNKDFSEKKKSKGKDNLHTLYWKMLFDEKNLKDVVLKLNGEAEVFFRQKSILYNEEIWNKGHHYSELKDRFSYPIISNKRYAEDKFFLHVPITLNFKADGINNVNNMVNEFIKDNRDIHIIGIDRGERHLLYVSVINQKGDIVEQCSLNEIVTEYNGKIFKKNYHEELDNLEKERD

SEQ ID NO: 61709 - protein, 922 aa, Unknown
  Microbial Source - Accession No. GA0124945_1030784
MHLELTIKGSENPKKQKQIQEKTKWLKQKQFPVILVEKALSEYKSIETNEDLKTRISDTTLCDFFKRCGNDDNGQDLFDRIEARLREKNEEGYSLEDLLKKEFTTERKLMQDKTKTLLIKNFLDVIQGDKDDITAGLLHFVKCLIPRTEISEKNELFYSGMEKYLNILSEVTPLYNKARNYLTQKPYSIEKVKLNFENSTLLDGWDENEESDNSCVLLRKRGYYYLGIMNKKHNMIFDRKIYPKATEGEAYYEKMIYKLLPGAYKMLPKVFFSEKNIDYFKPSEEILRIRNTASYSKNGQPQEGYQKASFSIEDCRKYIDFFKKCIANHWDWQKFNFNFSPTEYYQSIDEFYREIERQGYKIDFVKIPESYINQLIKENKLYLFKIYNKDFSEKKKSKGKDNLHTLYWKMLFDEKNLKDVVLKLNGEAEVFFRQKSILYNEEIWNKGHHYSELKDRFSYPIISNKRYAEDKFFLHVPITLNFKADGINNVNNMVNEFIKDNRDIHIIGIDRGERHLLYVSVINQKGDIVEQCSLNEIVTEYNGKIFKKNYHEELDNLEKERDRARKDWQTIANIKELKEGYLSHVIHKISKLILKYNAIVVMEDLNSGFKRGRQKVEKQVYQNFEKQLIEKLNYLVLKESNVDEPGGVLRAYQLANKFETFKKLGKQSGIIFYVPAAYTSAIDPVTGYIQYLYPLKQADSVEKARKFYSQFKRISYNPHKQWFEFSFDYNDFNIIYHGKSSWTICTTNTERYMWNRLLNNGHGGEELVYVTNELELLFGEYNIIYGDGKDIKQQITDVQDIDVDRTAKQFYKRINELLNLTLKLRHNNGKKGADEEDYILSPVEPYFDSRFESRKPSMQQTLPINADANGAFNIARKGLLLLERLNQLGVEEFEKTKKSNNKKTQWLPHELWVEYAQNHTRK

SEQ ID NO: 61710 - protein, 409 aa, Unknown
  Microbial Source - Accession No. GA0133944_1001807
MKLVQRHLIKRTNKYFSEIDNLAFLSKNLYNCGIYQCRQAYFKGEKPPTMTDLHHNLKTSIDYKALPAKVSQLVLKQVEKTFKSYLAAKKEYYKYPDKFTGKPKLPRYKDKVKGRNILSYNYQAVSQKLLKQGFVNPSGTNLKIPTDIKEITEVRIIPKVGAYCIEIVYEQPEIEQSQNTHYAFIDLGLNNLAAVTSNKPDFQPSLICGKALKSCNQKYNKTLSRLRSQLPANQKSSKRIQGLTLKRNCKVDYYLHTASKYIVNLLVSNQISLLVIGQNQCWKQNINIGSRNNQNFVNIPHSRFVEQLTYKCQLSGIEVKTVNESYTSKCSFLDLEPIQKHSSYVGKRVKRGVFRAKSGYLYGADINGSLNIGRKVVGEVAFSGDPIERFVVNPVRVKAYKETCGHICP

SEQ ID NO: 61711 - protein, 406 aa, Unknown
  Microbial Source - Accession No. Ga0134095_1000962
MCCKSYLLKIDKSHLNKKVAKQLNLLFLESKWFVNHAIAQGVFDVDYKTKTVLVKKGEGFEERKIQVLSSQMKQALLENLKKDIKALSIKKKNGHKVGMLKFKKFIRAIPLKQFKVTYSLCGKNHICIQNIGKKLRVRGLKQIPEGVEFANAYLIQECRDYYLRVVTYCLPDKNQQTEDKAVGIDFGVRNQLTLSNGISIQYRVPITKKLKKLYQKLSKKQKNSNNRYKARVKVQKEFCRLNRIKDDIKNKIVSCIKNNYSIVCYQNDSIKLWQTWWGRKTFETALGEIKNILKERISTPIALKREFPSTRRCFCGTENQIQLDEEIYSCINCGLRMHRDLKASISILLEGLNQLPTERREAALQYAERKACGEESSTLSMFEYLNSIPHVRARLLVETGSLSALA

SEQ ID NO: 61712 - protein, 855 aa, Unknown
  Microbial Source - Accession No. GA017716_10003017
VVASRYREARTLVRRLGRLPGEGEASFRAKLARLRKHFERFNVDVSELCQWLMGLRKQHCHKAGTASFGVLGDFLLHPESSNVAPGEAEADRWRLLVFDAVAGICPAKQLTNAPMPRGLPEAMEREAKRLADLEWRRRNTTQSKLIDRLAILEPAHRLVLLKAAAEWVVSRYQRGLENWAARRGEWEKERHAWEKRHPALSEEVRQRFTEVFKSLNDPERTDKPGVRRKNPRICPYERLRANIDNCIYAGEKGHGALCWKYAEFVKARKTRQPQFNDKRFAEDAEKVLPLLKQGMKRHQALQRLFPRDRPHGQLAQQRFNENWTAYLQALGLKEERVVNRGRLPHCLKIGETHEKSKCAWNPHTELCKQYKRALDQFDEETLKLEPLYREWRRDYLAGPGKPQFRYPSSRELPMPKIFGAGFHEIDFDRSILRLRLEDMPEGEWIEFGFAPWPRGYRPSKEEVKVKGAISSVHVNFVGVRARAGFRFDVRHRASRFQCTQDELDQLRSRAYPRRAQDREYLDAARKRLLESFAEGEEAAKRELRLLAVDLGETGACAAVYHGHAHQKDVQLAILKINRLYTQLPEALEPDPHGRPEEGKRKYERDDPRGVRKEHMGRHLKRMADGAASIAARRQGTMPATVTMAGHDFRGLKRHVTWMIRDWARHNAARIVAAAEEHGCDLIVFESLRGQKVPGYHELSSEKERDKRQLAMLSYGRIRHKVREKAVERGMRVVMVPDYRSSRLCSSCGHEQCAEKWQERRWRENKKKRLFKCVCGEPAPTEKPHHGGSAPDRQRAARRDGPGPGKRPGMAADQAKQRCRCGAEMNSDANAARVLARVFWGEITPPASERSFAGSA

SEQ ID NO: 61713 - protein, 439 aa, Unknown
  Microbial Source - Accession No. GA0137716_10003038
MPTINYRYGLLPPVEGRDEVMRQLHVAHEVYNTLVQYERERRKAVADATRETDAEVARLEAEVEALLSRLTALRSEIQAARAGGGDNARLAEAQAEARVCKRLFGEAKGALREAKRAARQNPALRERLAAIKDEHHRRQLALYHEVVEVGKRLYWPSWNDTKAAVEQAAKKTKNGDLRFRRWTGEGSLYTQVQGKQPICETATSRWVRIDLVPPEAHDPATPRGERRRLCRTRFYLRIGSTGPREDPVFAVFPMVYHRSLPPDAVICGARIVRRLNADREYWQAVITVDLPDAVGQKSGPRVCALDIGWRDRRPEGSDEPPPLRVAAWYDGDRTGEVLVDPSVFERCAKADAIRSTRDRMLDDMRAFLSEARKDLPEHLAEALAGCGLWRAAGKFARLRGLLSAGDVPAEVCARPVSRVVSPRPAPVAIRARHEVERDP

SEQ ID NO: 61714 - protein, 456 aa, Unknown
  Microbial Source - Accession No. Ga0137716_10003531
MGNVKAGQLAGVRVVTLEISGLTKDDIARWRALMDDCRGIVNCTWQTWLVWHVQNGTRAKLQAYLAEAKAWHEGGKQGKKPEWPVKAVTPECAKLTYDEVSAAFPYIETTARELCRNAVIQKINNTKAAHGSLSGWVAILLHRQSLPSTVRSVPIPFSKRNAIIEPPDPADENGCWKLHVKVTRRPRPGKKAGETVTDTVKLWSKGRKAASAVATLKKIAAGVYEFCGSQIIYKESRRKWFAAICYRASIEPPKKLDKEQVAYLRPAPMSATWPHPWRLRVPGANRAPGGCGDWIASVRRRIFAERRSRQNSYRYAGSANKGHGRERALRPIWRLQNRWKDSVKTYNYTVAKDVVDQCVARGIGRLVYFQPGDRVRDSRFLTVSGCGEGDHWAGWDYYQIGKRLADLCQAQGIDFVWRKPSEHPREVGGNVEKTEAKNGTVRNAARKRKASAGLHG

SEQ ID NO: 61715 - protein, 685 aa, Unknown
  Microbial Source - Accession No. Ga0137716_10006890
LDNLFNKYEQLVRITDSFIYHLYPYYANINEQGNLERLKELIKSLDEKAIIKNQRRKREPQKAEEQTTTETETKHQYTHSYLLKTLLHRFIKYAKKYYAKYYAKKHYAKKHYAKKYYEIDVDVKHAYLDTQGGLTDIMHSNAESAYKHRSIPNLRGLSNVMPIRVSKRPLLENRRSKDNDKYYKRTAEFIFNNGKIMLRIGSQRNGLIKIAKRFNDIEKLGMLIDAIQGKNNLTIGDPCYLVRKEIDNGYRYYIMVSISKNVDKKALHEASKNKSKIRIIGIDSNISKYIATMFCIEVDKENKTYKLINAKGIDSKDYINAVKKYEEERRKLQQERMKGKVNKKKGSRYKEEEDYTIKNRCGDSKRIDLRRQLIGYICNQILEFANKNDADIIVIEDLKGLNKELKHLRIIKKELGKLYNDVNSKGNNAIDDKINEINKKYNNKTRRPLLELLDKIKEYSNNNRDRIKVAKYVIKQKRRVERRISLLSIMAYYQFKQELEVEALWNGKLLYIINPKYTSQQCLRCDHISKLNRITQRMFKCIKCNFEMNADFNASANIALRFAREILKLDLKQEQGKSSSMMTVTNATTPLHASINAGSKVGVVVSNNNTDGSVAPTMSGVASILQGCDEGRSLFMRGQTLTVKGGIFTALKGRSLFMRGQTEQPCSAKRFATLDEFLEKRGNGG

SEQ ID NO: 61716 - protein, 519 aa, Unknown
  Microbial Source - Accession No. Ga0137716_10009026
VRSFKIPLKHKDTSVLNAFSERVRQDYISQVGLVNFSDWFEHRGRQWYSLADFWLDSLRAGVVFAHKEAEIKNLIIYLNGDDSVLTRFDRVVRERYPDLYGLVSVKPLYEFCISDTRPGNKSFNELLSSLRNRLFPNYRNVENNDVDEWVKRFAGWVYGDREEGEDGERTRRERRKAKVIEFLGFDPFPQMEYDHLFYFHPLIPMNKNASPKDLLFQYKDVLEKSDPGLYGSDIPIQEKLKMAFGLFNNHGALAGYFNQSLSALAQGDPSIKRHIQSTSTYWQSYEDQLDERISFLQSCAKKVSEPILAKGWHEYRSSIGGKIESWVSNTLNQDEEIRRQLFGYEGENGSFEAVVKQTLLDVTQDVTLGENGVAVVSESSKTIARDCLAIIGDDCSRSPSDERLFLLRKLIGGLRVRLGEEYQIAFRELQGTNEKEREKEAKEKRAYKKYPVIFKDIRLVPNFLGETKKKAYEKFVGSAALLKEGIAFLASIDEQVLRATPSPRFESDAELLEFALKQC

SEQ ID NO: 61717 - protein, 1262 aa, Unknown
  Microbial Source - Accession No. Ga0137716_10009341
MAKRKSRLAGYRLHKERILFSGGQVIRTIKYPLVPLGPSEETAQFLKDFERAIIADDLKIRGDLNINDYLAHTVEGKPPYTLFDFWVDSLRAGVIWMPKGTKLIDFLASQYNANSPFDDVWEKASPRITAIFKKDKFKDIFLSDPIRNTSTKNSFYKRILESLKDDLVKENIIISTDAKEEVELIVNSFFNDDGQLILDGESQFDFWEKEYNLDKGIIESAKPKGKYTDITFVIIPELISNLNTKQTLEDLINKRDTWLSNRELDEDNKLLASILGFSDNANGFSNYLGMVLRGLQEEDGDKEALYEAQKTIFPRLENYRDKVLESLDFLSQKAKLLGETSLPLVNCWHDYRSVFGGKLQSWFTNFQKRKEELDEQISQFKESLFKAKNYLQKENFGEEADKGKEDILSFLSLLENFFADEQKSIKIEENYQLFEPLLALIRRRLNFFYQKYLQKEGDETKVNKFKEFEGLYKTIYKPVAFYGYSAKRANEKFVNETVPILEDGIENIKKLIFCLQDSFSVQKTFEDIRRDGGEIDGPYRKFLQFFWNKYVDASINSPLFLEKYEKIIKESIEDNKWEEISDKNKKGRYVFFKSPYAKGSIEEIQLKTNDYLEQLQTSVLELAEFILSFERDTLLSDAALLLDWIEVSKNIISILLRFNTKETYKLDDLLLESFSQAKRYQELFRREDYPKNEFSFIIQSLILSEIRGAAILYSKREYIASYSVQVVNSDEKFKLYYISKEEIPITADTIKSKPDSIERKQLMKPHCFVVALDKVSEKKKNQSFNAILLSKSNITAVFLPDESLQKLFKLSSSPYQLQFLDKYLYRPAGWENTDISLSEWNFVVEKRYKINWDLQTKRPKLLPITDSEQAKKNKIYLAIPFNLSPNNQIKQSAPLKSIARGNEKIEKDLSRLNYPILGVDVGEYGLAYCLVKFDFDKNTYKITGIKLGSDEKETFGFIEDKNIGNIKDKFSEIQQKARQGAFDEEDTIVARVRENAIGHLRNRIHIVVTQEKSSSVYEDSITNFETGSGRTTKIYNSVKRADTESSTKADEQIHNHIWGEKTKLVGRNVSAYASSYTCVNCLKSLYQIKKEDLTKMTITQKDGRVVTISSPYGDIKGYVSNEEKYDVGYQFRGTDEDFKKLRKIVQDFARPPVSNRSEVLEKYAKSILETGRIEEWRKRRGNSSIFVCPFCQYVADADIQAAFMMAVRGYLRFSGIVPSQSYKEKQSQEGEKTAGESFLEQTQEQLKDIDRSRIKNAFSIRI

SEQ ID NO: 61718 - protein, 1546 aa, Unknown
  Microbial Source - Accession No. Ga0137716_10027208
VNAQSCPCRCNSSDHYFFSRCLRSEQVPTFSPRIDLALLKLLYFAYRANTLRTQNWTFLPIAAGRDPMSRGRAPVTQRAYTLRLRGVDPGDTSWRKALWQTHEAVNKGAKVFGDWLLTLRGGLNHTLADTKVKGEKWKPDRDPTDDERRVRRILLALSWLSVESKLGAPEKLIVSSGEEAAEDRNSKVIAALEEILKSRNLADNEIDDWKNDCSASLSAAIRDDAVWVNRSKAFDEAVKHIGPSLTREEPWDMLERFFGSRDAYLAPAKGSEDESSEAEQEDKAKDLVQKAGQWLSSRFGTGKGADFPRMAAVYGRIAAWADTAQAGTTGKDAIKELAAALGTFAPASNDIQGVLGLISGPGYKSATRNLLAQFDARPILTQQDLTRLNQTATADRKKCATNTGSKGQRAYANAILKNVESVCGFTYLQNGGPARHSEFAVILDHAARRVSLAHTWIKRAEAERAKFEEDAKKIDQVPKAAREWLDQFCLKRSEASGALEPYRIRRRAVDGWKEVVAAWSKPDCKTAEDRIAAARALQDDPEIDKFGDIQLFEALAEDEAVCVWHRDGDAAKPPDPQLLIDYALAAEAEFKKRRFKVPAYRHPDALLHPVFCDFGRSRWEIRFDVHKNVQTPFPRKILMVARPSVTDVHKNVQTPFPRALRLTLWTGSEMKQVPLCWQSKRLARDLDLGNNARNAGASEVTRADRLGRAASNVTKNDEVKIAGLFEEEDWNGRLQAPRRQLETIARYIEKHGWDQKAETMRDGVQWLVSFSARLQPHGPWCMYAKNSGLGLKHDPQYRPHVEENKKRKGHARLILCRLPGLRVLSVDLGHRYAAACAVWEALSAEAFKKDIDGKIILRGGTDKDALYCHTEHKANGKKHVTVYRRIGADTLPGGTPHPAPWARLDRQFLIKLQGEEEEVREASNEEIWAVHKMEAALGRRTPLIDRLIASGWGSTEKQKARIEAFKKLGWTPAQTPQPTSESAEDGETGVYRPSLSVDELMFSAIRTMRLALKRHGDRARIAAHLMTDEKTKPGGIKEKLDENGRIDLLLDALVMWNDLFSSREWRDDKAKRLWDERISSLSGYRAPEEIGEDTAGSDRKPKQKENREKFHDAAKALAEDATLRKEIHDAWKIRWEEDDGLWKKQLRWFKDWILPRGKATADPGIRKIGGLSLARLATLTEFRRKVQVGFFTRFRPDGTRADTKEGFGQKALHALEHLREQRVKQLASRIAEAALGIGSENKQHWEGGKRPRQRTFPPCHAVVIEDLTHYRPEETRTRRENRQLMTWSSSKVKKYLFEACQLHGLHLREVPASYTSRQDSRTGAPGIRCQDVPIREFMRSPLWRRQVEQAEAKLAEDKGDARDRFLCNLNQIWKDKTLAEWEKAGAVRVPLNGGEVFVSADPVSPAAKGLQADLNAAANIGLRALTDPDWPGKWWYVPCDPASFKPIQDKVEGSAAVEPDQALRQPAQEHRSDASAKKTRRKMGAGKSKEVVNLWRDISSSPLKFGEWREYGAYQNEVQCRVISILKKQCREKRLHDGSKEDDIPF

SEQ ID NO: 61719 - protein, 1368 aa, Unknown
  Microbial Source - Accession No. Ga0137716_10032400
  misc_feature (444)..(548): Xaa can be any naturally occurring amino acid
  MISC_FEATURE (558)..(692): Xaa = any amino acid
MNNNTTNQQSIWSAFTRQYALNKTLRFELKPVGKTEDFLKQNKVFEKDKTIDDSYNQAKFYFDKLHQKFINEALSSDKVQEIKLEKFAKEFFSLKDKIQKLKSDKKQKEVYGVEKEINELRTNYYKEIKSLLDKVAEDWQKKYQEIGINFSKSDLKQKGTDFLMKSGILGILKYEFPKEKEDEFKSKDWPSLFVEDKANPGNKVYIFDSFDDFTTYLLKFQETRKNLYKDDGTSTAVATRVISNFEKFLNNKKIFEDKYNNCWKKIGINKKEKQIFNIDYYYSCFIQDGIDKYNDLIGQINKKTKEYRDRNKIEKSHLPLLKVLDKQILGEVIKERELITKIETETEEEVFIKRFKEFIDQNKKRISIIKNKKDSEKEKEYLTDDLFNEKFESEYAGIYLKRSAINTIANRWFKNTTEFLLKLPQVSKSKSKENKESPKVKPFXXXXXXXXXXXXXXXXXXXXXXXXXXXXXXXXXXXXXXXXXXXXXXXXXXXXXXXXXXXXXXXXXXXXXXXXXXXXXXXXXXXXXXXXXXXXXXXXXXXXXXXXXCDAALRIYQMMKYFALEARKQDDIPLDYATEFYNRFDEYYKDFKFIRYYDAIRNFITKKPSNEDKIKLNFESGSLLTGFDKNKESEKLGVILRNRNSDKYFLGIINKEHNKIFDSKNESKFIGDDNKDLYEKMELKLFPDPKRMIPKIAFADKNKKYFGWTQEIQKIKEDFKNFQENKKDNKDLKFDKNKLSKLIEYYQNCLEKGNYKKEFEFEWKRPEEYQSMSEFNQDIEKKNYKIKFIPIKASYIEDKVKNGELYLFEISNKDFIWPNQKKNIHTLYFLNLFSDKNIQKPVFRLGANAEVFYRPASVRKEMDKERSKGGKEIIKYKRYTEDKIFLHLPIEINYGCPKDPNKNGYNKKIVEFLNKNKDEINIIGIDRGEKNLLYYTVINQKGEILAHGSLNEINGVNYLEKLIEREKERQINRQSWEPVVKIKDLKKGYLSYVVRKIADLVEKYNAIVILEDLNFRFKQVRGGIERSIYQQFEKQLIDKLGYLVFKDDRDPESPGGVLNGYQLVAPFDTFKDLGKQTGIIFYTNAEYTSKTDPITGYRRNIYISNSASQKKIKENLINKLKEIGWDEKEKSYFFTYNQKGFGSPISKQWTLYSKVTRVRREKNNSTGYWEYKPIDLNKEFEDLFKKYGINEKSSDILSEIKELIKNKEEKLTQKQKFDEKEKSFYERFIYLFNLLLEIRNTMSLQVKLDKRGNEIKLEEIDYGVDFFASLVKPFFTTAGVRFIGKQNENGKIEKHKKEEFTKENLTDFEELFKGCTSENFDSDGVGAYNIARKGIMILKRIKQNPEKPDFYFYKEEWDDFALKNALIK

SEQ ID NO: 61720 - protein, 418 aa, Unknown
  Microbial Source - Accession No. Ga0137716_10033855
MAVKMAIKVFKGYLRRVPADDQEGRAHRREVLGQLRQASYHAAQFANLLLSLNYLKFKFEQRGEIPDSLDKEIKRQYTAWNDRLSAAVRDAVSRSVVGKIRALGRKVMRGDVTLPSYRRRGALLVRGDRGAVQLWQDNGRVFCSLKITPEPPVVLELWVKGLKTSPGYRAVLDRLLDGTYAVKQAQVIFPEQGEVEVRLAYELPVVERTGNKVATLEIEEEALLLRWGQRRALFPHEVGHLARVKRQIEARMAKARREARRTERHGRSRFYQYRVLRRFRRRWYHIQLTWRQQLAARIIRQAEAWGVDEIELPTGGKFAEELNQLLDWSALASTLAAKAQERGLRVSQIPSQEEQEQEGRKQARKQRRSRARTGKEESNDPHQTSDAFRHGPAEPDALDGPGRRAVAGPSGPILVPRP

SEQ ID NO: 61721 - protein, 577 aa, Unknown
  Microbial Source - Accession No. Ga0137716_10038387
LTVAIKINAGDEMPEEQEKIITGVKFKLFFDNFEDKKEMNRYFDEYARAVTFAARKINEIQNSFKDTWVLDEQGKKQKGEDGKPLRPIEICNSCNEKKEIIKQEIESGKKFCLSCYSSTYSKPMIRKLLVPKTHGQEKRKVDPSINIKNAAALSATSYHYAVRDASQLLQALKEQRRKRRDFLKRDGSRLKKFKEMLDNENKRFQLPMKGRMRVPRFVHIDDKENTNLRGWRIKDLQNKVKRLQWNIDKLKRSLEKPSPIEYKGTKVSLSNDTIFDIQQNKVRIRLWKPKWYKISGSDVANRHGVEFFKDKLSKIQPKKYGWLIKKIDRNAKSSKTKTEYYNIPIKVKGTTRYISIDSINFYLQYPIEEQIEYRNPTTLMGIDIGLNKLAAVSVLPLNSNNVKPLLVKIFSGKEIKRLRYRKLKHDRMLRNVHHRLDKIKRIRSIENMINQQYHILAKQIADIADVNNSIVAFERLEDMKKKLKAEERRSQRFIRHSFVYATIRNLIEYKLKLRGLRTIEIDPEGTSYTCSKCGATNTTRPKQAIFKCNDCGVQLNADYNASVNIAKKALNTLNINK

SEQ ID NO: 61722 - protein, 693 aa, Unknown
  Microbial Source - Accession No. Ga0137716_10042212
LGTRSLKYRAYPTPVQADLLGRMHRACIALQNALIDQGRQAQARVTMEHARSVQVVRSACCGVRLRQGRCRCTGCGQPACQARDGRRCGQTETAQIERVVRSGLLLDAQTRCGACLRPCKSVSTCASCAGPLRRSRPSCPTCRAAVTRAPKDEQAQAPKDTPPWRCPSHGPVEAVAECGPNAWVCEACGPRARAADAAVSDCHRAPLRSPYRDVAELREAQKDARGALNVRVRRRTGIGLDQVPVKMLQEVLDRVDLAQQAHRKGQRGEPRFRSALRTRVSLGCPVQASPLVQVPVADRTHPALRLPVATAPGSPAVGDLRLVLHQHEAALLDGTITIKKVIVHEDAAGRWWATLQCDGVPDQGLPAAAQGRERGVDLGLQPLAVLDDGTQIPAPEFLGRALQQDKPEPGKPRRMSPLKRAQRELSRKIEAQTQRRRQMAAAGNPRPPQSKRLARAQLRVAKLHARIADGRKDFAHKLSHGLVYGGEVAPGVRLEGAERIAIEKIGVANMVRRSADPEIRDPAGLNRRDLDAGWGQILQLAQGKAAAAGALVVPVPAQRDQKAGGRQASARQILAAGQAVWSAPDEKKKSSPRSKQGGRRQGMPSLDASSRSPRAGDEDSTQAGRPPRAEGIGSTTRGNPGASVPVEASTTDILYEHRGDAHGAPSLSSSAERPDRGVLAKEPPKPRRSRGSA

SEQ ID NO: 61723 - protein, 448 aa, Unknown
  Microbial Source - Accession No. Ga0137716_10061480
MAKGKKKEEKPLYRAVRFEIFPSPQDVEILYKVSQNLSLIWNEALKERQECFEKNIKPIYEKIAAAKKKAEEAGASEVWKENLRKTINKLMREKGFLVRFTSEKESLLLELKTAFAKHKVTLYDQINSLTAKRLNEAFAFVPRNWQEETLDSLDGSFKSFLSLCKNGDMDANPPGERDVENHFYKIPGRYGFKIANGKLVLSFPKLDYRLTLDIPTFQMGKLGAATKLKKFELYRDERNMAKPGRFWVSIVYEVEKPISRPLLADNTVYLAVGASRLGVISPNGSFCLNLPRPDFHWKPNINNLEDRLKHVVKGSRKWKRLISARAKMFSKMSHQQKHGQYEVVRDLLKLGTHFVVTDLKVRSKENSLADASKANRGGSPFGANWSAQNTGNIGRFIQKLTDKAQERGGTVLKRQPPKLSLEERQLPEKQQKILIAEKLREEFLAEHR

SEQ ID NO: 61724 - protein, 577 aa, Unknown
  Microbial Source - Accession No. Ga0172363_1001655
MAEEKFFFCEKCNKDIKIPKNYINKQGAEEKARAKHEHRVHALILGIKFKIYPKKEDISKLNDYFDEYAKAVTFTAKIVDKLKAPFLFAGKRDKDTSKKKWVFPVDKCSFCKEKTEINYRTKQGKNICNSCYLTEFGEQGLLEKIYATKGRKVSSSFNLFNSTKKLTGTHNNYVVKESLQLLDALKKQRSKRLKKLSNTRRKLKQFEEMFEKEDKRFQLPLKEKQRELRFIHVSQKDRATEFKGYTMNKIKSKIKVLRRNIEREQRSLNRKSPVFFRGTRIRLSPSVQFDDKDNKIKLTLSKELPKEYSFSGLNVANEHGRKFFAEKLKLIKENKSKYAYLLRRQVNKNNKKPIYDYYLQYTVEFLPNIITNYNGILGIDRGINTLACIVLLENKKEKPSFVKFFSGKGILNLKNKRRKQLYFLKGVHNKYRKQQKIRPIEPRIDQILHDISKQIIDLAKEKRVAISLEQLEKPQKPKFRQSRKAKYKLSQFNFKTLSNYIDYKAKKEGIRVIYIAPEMTSQNCSRCAMKNDLHVNTQRPYKNTSSLFKCNKCGVELNADYNAAFNIAQKGLKILNS

SEQ ID NO: 61725 - protein, 491 aa, Unknown
  Microbial Source - Accession No. Ga0172365_10006450
MAIKSFEARVICKPDDKYTADQKRQFLWYTHKVFNDGVRAVLPYVFKMKRRKLGDEFQAIYYAIKNSQDAIGKLEAVIHVDWKTKKAGKYPPEQWKKFLQFPEIEKEFRQRLHEQGEKNIKKFRKELERQKKELAKEIGGKDVWADAAMRLHQRGELLFDREKLLDNLPSEFRRKIYEMTIQLMHGYQELVANWEDEHAKWLKEKDEWEEDNPEYMKVRPIFEAFQKEKGKVKGSRIRWFDYLDFLSSHPDLANWRGKASEIVPLTSEERKGLRKPREHFEAFFEKNPELRELDRKHKYYQEKFSRSQSQRTPNPDGFKHRPTFTLPSADKHPAWYSFKGATDPTKGATYRNHNIENCSVDLKVLTALEGKGRNPKGMVTYEFEPDDRIKKFRYVGTKEKGKKAKGFVYYDSILQKERPAKIQGIKLVFRPASPDGIPYLIFSCAIEDEKSKIKIWQDKETVDDGVFSKPKKAKKILYPPELVTLAIDFGQ

SEQ ID NO: 61726 - protein, 1487 aa, Unknown
  Microbial Source - Accession No. Ga0172382_10012866
MPQQDKPLVTQRAYTLRLRGADSNDQSWRDTLWQTHEAVNKGAKAFGGWLLTLRGGLDHTLADTKVKGGKGKPDRDPTDEERKARRILLALSWLSVESSLGAPANFIIASGTEASEDRNGKVVAVLEEILKSRGVDQNEINAWRDDCSASLRAAIRDDAVWVNRSKAFDDAVKSIGCSLTCEEAWDMLERFFGSRDAYLAPVKGSEDEFSDTGQEEKTKDLVQKAGQWLSSRFGTGKGADFSRMAKVYQKIADWADTASPNMGGTQAVASLATALSGFIPASNDLQGVLGLISGPGYKSATRNLLNQIAADTTVTQEDLKKLNETAAADKGRCETNTGSKGQRAYSDAILKDVESVCGLTYRMDENGNAVSVADYSRYDDDYNWGSARHSEFAVILDHAARRVSLAHTWIKRAEAERCRFEEDAQRMGNIPVGVKEWLDSFCLERSGMSGALEPYRIRRRAVDGWKEVVAAWSKSSCSTSADRIAAARALQDDPEIDKFGDIQLFEVLAEDDAVCVWHKDGDAAKAPDPQPLIDYALAAEAEFKKRHFKVPAYRHPDELLHPIFCDFGKSRWDICFDVHKKVQTPFLRALCLTLWTGSEMKPVPLCWQSKRLARDLALGQDTQNDGASEVARADRLGRAASNVTKSDEVKISGLFEQADWNGRLQAPRQQFEAIAAVMNNLSLSAQERERRMSGMRDRIRWLVTFSARLQPQGPWCDFAKKTQLRIDPQYWPHADANKTRKGQARLILSRLPGLRVLSIDLGHRYAASCAVWEAVNAKQVKEACQAAGHEEPKESDLYLHLKKKVTKQKRGKHVEVEETTVYRRIGVDTLPDGRQHPAPWARLDRQFLIKLQGEEEGVREASNEEIWAVHQMEAALGRPVPLIDRLVASGWGGSDKQKARLEELKHLGWKPAEKPEPGDESDAGEESNAYRPSLSVDELMSSAVRTMRLGLKRHGDRARIAHYLITDEKTKPGGIKERLDDNGRVDLLQDTLLMWHDLFSSRGWRDDAARQLWDNYVAKLSGYKAPEEIGEESSGPERRNKQKENREKLHDVAKVLVTDARSREDLHDAWKKRWEEDDERWKRQLRWFKDWILPRGKAANDPTIRKVGGLSLPRLATLTEFRRKVQVGFFTRLQPDGTRAETKEQFGQSALDALEHLREQRVKQLASRIAEAALGIGRMRRPMGGKDPKRPNSRVDEPCHAIVIEDLTHYRPEETRTRRENRQLMTWSSSKVKKYLFEACQLHGLHLREVSAGYTSRQDSRTGAPGIRCQDVPVKEFMQSPFWRKQVKQAENKGDACERFICDMNVMWKDKAVADWEKAGVARVPLKGGEVFVSADPVSPAAKGLQADLNAAANIGLRALTDPDWPGKWWYVPCEPASFRPVKDKVDGSAVVNPDQTLRQPTQAQSGDTAKDKKKRGNKGAGKSKEVVNLWRDISSSPLECIEFGEWKEYAAYQNEVQCRVVHVLEEQIKGRDRQPHDGSKEDDIPF

SEQ ID NO: 61727 - protein, 493 aa, Unknown
  Microbial Source - Accession No. Ga0180300_10000403
MEDKIKLTVRAVIPPRDLGLRKLMREYKAYKKALIPRVREAVREVIKDRSIRVYAQQKWMIEKKLLEYLKNLPFHPMPFHNQSVWIENKDGDFWIHFKTKEGEAICYLLVPAKYRSLIEKACGVDNPVLGQVELIEDRKYGWVNCHICLRLPKPEPYEPKGWVGVDVGWNKLATSILCTANPHVKFSNPTFHGKQFKTRIIQLRYLLKQYARKGKSWKKWNHRLKNTIKYAIGVTAKEIVSKAKKFKAGVAMEKLTFKSTTKGYLVPRYKLMIAVKTLCEREGVPFKLVPAQYTSVTCPYCGYRDKKNRNGKWFKCLKCGYQTDADLAAAMNIALRAFDSSPDGGEIGTGHAPCLKARGLHAPERGDVATPLRAMRDVPLERAANTTMYCNCSQNVHTVTMPHTVDCKLQHAAQRALAYIGPVTMPHTVNCELQHVPHSHRSHGSQGVTMPYTVGCELQPPNACSTMYLTAPLIDNPRFTANFSTRSYSFRGM

SEQ ID NO: 61728 - protein, 329 aa, Unknown
  Microbial Source - Accession No. Ga0180301_10011215
LKLEPTPSQEKVLKGCEEESFKFLSLSREKLKQLLYHELKDEVKLSRRTLALLIQRFTGSMGGKTIIPFDEDNSKFVKEDGFWFVEIQPFKGRGRIKIPVARTEVPYYSVIQELQGYPFYITRENVDWFAYISIPAPNNSNGTVIGIDFNLKKWVATPYQGKPQFFDAEKYEGEIDRLQKLIARYQSRGESEKVKECHEKIQEQVKLAHGNFLKLIRDTWDVCNLAIEDVEVMFKLREKDSQVINNWLYRKAALRQFALRAMAKGFNIIEVNPEGTSKICHRCGSPVKIYGKHKRLITCEKCGYKDYNRDLNAARNIAKKGLHHLTLHL

SEQ ID NO: 61729 - protein, 1507 aa, Unknown
  Microbial Source - Accession No. Ga0180435_10008691
PPIYIRRHCLNNIDYRPSWRLPFQRFSIPPDGPIFNAFRHLADAKVKGGKSKPDRDPTDEERKAWRILLALSWLSVESRLGVPANFIIASGTEASKDRNGKVAAAFEEILKGRNIAADEIENWKQDCLASLSAAIREDAVWVNRSKAFDEAVKLIGDSLTREEVWDLLERFFGSRDAYLAPAKSSEDESSDTGQEEKAKDLVQKAGQWLSSRFGTGKGADFRRMKDIYEKIAQWAANNNSSPLVGTDAIVNLANTLQNFNPASNDVNGILGLISGPGYKSATRNLLTQISNKITVTQEDLTKLSETAASDKGKCETNTGSKGQRPYSDTILKDVESACGFTYRVDKDGQPVSVAEYSKYNDDYSWGSAKHSEFAVILDHAARRVSLAHTWIKLAEAERRRFEEDARKIDDVPDSVKEWLDSFCLERSRTSGALEPYRIRKRAVGGWKEVVAAWGKSSCTGYADRIAAARALQDNPEIDKFGDIQLFEALAEDDAVCVWHKDGDAVKSSDHQPLIDYALAAEAEFKKRHFKVPAYRHPDALLHPIFCDFGNSRWEIDFSIREASADAKKKAEEKVTKKQKEFEKAQAALKKAGENGNNESAAKEKLDAATKKLSEAQKEFERLSSIHLMKMTLWNGETIAETHLSWQSKRLVADLALEQNKRATEITEVTRADRLGRAASNVNGSSRVKISGLFEQKDWNGRLQAPRQQLEAIAARVEKHGWDAKSQSMLSHLKWLVTFSAKLQTQGPWCDFASENQLNIDPKYWPHADANKKRKGHARLVLSRLPGLRVLSVDLGHRYAATCAVWEAISTKKVREACKAAGRTEPKDSDLFLHLKRKVKKHKKGKEVEVEETTIYRRIGANTLPDDKPHPAPWARLDRQFLIKLQGEDREVREASNEEIWAVHQLEAELGRPMPLIDRLVKADWGYTSKQKARLEALRHLGWTPVNQTQDFAATDEGELRKPSLSVDELMFSAVRTLRLALRRHRDRARIAHYLITDEKTKSGGMKEKLDENGRINLLQDALVMWHDLFSSRGWRYDAAKNLWNEHIARLQGYQAPVEIEEDITNVERKKKRKENQDKLRGAAKALAENENLRKTLSKAWTEQWNDNDQRWKKRLRWFKDWILPRGKRKADKSIRHVGGLSLTRLATLTEFRRKVQVGFYTRLKPDGSKCEIKDKFGQQALDALEYLREQRVKQLASRIAEAALGIGRMKRSKNGKDIKRPRERVDEPCHAVVIENLTHYRPEETRTRRENRQLMSWASSKVKKYLTEACQLHGLHLREVQAGYTSRQDSRTGAPGIRCQDVAIHEFMRSPFWRKQVAQAEKKQGDSKGDTREKLLCALNGKWKDKSDPEWKNAGTVRIPLKGGDLFVSANRNSPAATGLQADLNAAANIGLRALLDPDFTGKWWYVPCDPKTFKPVNDKVSGSTVIDVNQSLKDNQPESGEKNPKGDKKTKEAVNLWRDISSQPISEKNTWKQFTEYWNGVVFRVIENVLRSYNAIPSQDSQESPV

SEQ ID NO: 61730 - protein, 646 aa, Unknown
  Microbial Source - Accession No. Ga0180446_1198
MLPKVFFSDKNIGYYKPSDSLLENYKNETHKKGEKFNLQHCHELIDFFKNSIEKHEDWENFGFTFSPTESYKDLSDFYKEVEKQGYKITFQPVSESYIKQLVNEGKLYLFQIYNKDFSEYSKGKPNLHTLYWKALFDPENLNDVVYKLNGEAEVFYRKKSIDNPTIHKANQPIENKNPNTTKKQSIFSCDIIKDRRYTLDKFQFHVPITLNFKAEGKENINNDVLNHLKDNSDIKIIGLDRGERHLIYLTLINQDGKILKQESLNVIKDEKFGIETPYHQLLQSKEEQRAKARENWGVIENIKELKEGYISQVIHYIAKMMVEENAIVVMEDLNTGFKRGRFKVERQVYQKLEKMLIDKLNYLVFKDKDPRTPGGLYKALQLTNKFTSFKEMGKHNGFIFFVPASYTSKIDPTTGFVNFFNTKYESIKKAQEFFNNFKSIRYIPSRSNPSEYNPSEYNPSEDYFEFEVDDYTKFNPKAQGIKKDWVICTYGDRIRTFRKPNKNNQWDYEKVNLSKEFKNLFKKHKIEYTNGSCIKEQITKKDDKKFLMELLDLFNLTVQMRNSIPNDKEDYLISPVKNSNGKFYDSREAGNNLPKDADANGAFNIARKGLLLIKKIKETKETGKLPIITNKEWLEFAIEKGQDIIK

SEQ ID NO: 61731 - protein, 1232 aa, Unknown
  Microbial Source - Accession No. Ga0181613_1004254
KEIKSLLDKKAEKWKEVYKKKRIEFSQTDLKQEGTNFLTKSGILGILKYEFPLEKEKEFKSKDWPSLFVEDKANPGNKVYIFDSFDNFATYLLKFQETRKNLYKDDGTSTAVAARVISNFEKFLNNKKIFKDKYVDYWERIGITEEEKEIFKIDYYYNCFIQEGIDKYNKIIGQINQKTKQYRDKNKIDKNRLPLFKVLDKQILGEVIKERELITKTETETEEEVFIKRFKEFIDQNKKMISVIKNQKDLEKEKEYLMDDLFDEKFESEYFGIYLKNSAINTIANRWFKNTTEFLLKLPQASKSKSKENKESPKVKPLISLLDIKNALDDFEKERESLGAIFKDKYYKTKEIDEAPLNDDNQESYWKQFLKIWGYEFNQLFEDKFNEKGFKIFWGYTEDLEKQAENLNSFSHKKEEIVLVKNYCDAALRIYQIMKYFALEAKKQGEITDFSTEFYNRFDEYYKDFKFIRYYDAIRNFVTKKPSNEDKIKLNFEKPNLLGGFSESPVGNAQYCGYILRKNDKYYLGISLFTHFLDIEKYKLNELKGEDFYEKLEYYSLDWAKNIVGGRVYQSFTKSKFGKPISFQEHKNEFKNYPKKHVEIIKELIKEKYLRRYPQLKQIIEKDFDTPKEMQKAFSDLSLKGFYWVKVKASHVDNQKIIEGGGNHEKRHLLYLFEIVNKDFVWSRKTKNIHTLYFLNLFSDKNIQKPVFRLGANAEVFYRPASVRKEMDKERSKGGKEIIKYKRYTEDKIFLHLPIEINYGCSKAPNKNQYNKKIIEFLNKNKDEINIIGIDRGEKNLLYYTVINQKGEILKHGSLNEIRGINYLEKLIEREKERQINRQSWEPVVKIKDLKKGYLSYVVREIADLVEKYNAIIVLEDLNMRFKQVIRGGIERSVYQQFEKQLIDKLGYLVFKDDRGSEFPGGVLNGYQLVAPFTTFKDLGKQTGIIFYTNAEYTSKTDPVTGYRKNIYISNSASQKKIKEDLINKLKALGWDEKEKSYFFTYNQKDFGSSISKEWTLYSKVSRIRREKNNSTGYWEYKPIDLNKEFEDLFKKYGINEKSSDILSEIKELIKNKEEKLTQKQKFDGKEKNFYERFIYLFNLLLETRNTMSLQVKLDKRGNEIKLEEIDYGVDFFASLVKPFFTTAGVRFIGKQTEGGKIQKEKKEEFAIKNFGDFERLFRNCSSDGFDSDGVGAYNIARKGIMILERIKQKPQKLYISKEDWDAFAIKNALVK

SEQ ID NO: 61732 - protein, 1039 aa, Unknown
  Microbial Source - Accession No. Ga0181613_1005053
MNQIQIRKLDYQLTKNIGFLLKDVILEKWLVQKSENLKSSRLSINKLEFLKKLNNLLEDLFSSKDVGLIDRFLFYKHERGFNLFNYELDKKFLCKYDLYSGKTRYSHLAFNKMSFKKIKGFWLYFSRRIEEEILNPLNNYLNLYEKGINPKESEIRSVLRKFQGRYYFELLKEFFDGLRFNYKEKNINKIDFEAKIKDIKNKINSINELIQKNPFENKDELTKFSFNYYTLNKRPLNYRGDIDDTQSIENYYKSLKESYEKSLNEKINQFEFIKRYNNIINFVNKNLGENLLSYSLENAVEKLKEFRATIKSNFYKDINRADKDKLDLNYFDRAHPLFKFKDKNSFNKFLNSKVDDIKKYFNYEFKGYKNLCNLYQKLAVERGKIKAQIKGLEKEKEEFINLKYWGFIADYNNEKYLILLKKEFRKDFKDYLDSYKEEKPDFTLYNFKSFTFRALEKLIFNSYNNDFFEGIKQDERISDLLKKSNIRDKYKIKESLNNKDLILFYKYILTSEYAKNNLDLEDFNLEEVLSKDFDNIEDFRIALDGACYFIKEINLSWNKFINAWKNNVSIFKIYSYDLIGKQKELKFHTKVWKAFWSSFKDSRIRLNPEGSIFLNVVDEDERRTILLKKEKLEREGKKFIRNRKLEDYYYKALFNFNLYFPSKEIKISFKEKDKIDKSIEEYNNNFNQQNDFKNLFYIGIDLGEIELATLGIIKFKDSSSNFELQKIKAYKIKDEFINPQNIKNPSLLDDNFFEEVELDSLDLSKAKLIRDKIVINGDISTYLKLRIVSAKRKLFDLVKKQGEALANEKICFYNETKNNLGVNLGNDVFVLKKNNKKEKYLRVYKYDPEFENICPKEYLNEELNNYYRSLLKDESINYYEEINSLRKAISSNIVGIASYLQDIFPSILVLENLSKETREYHMRKENFFLDSQVDWMIYRKLETKKLCPPNINNFKFLKDLESENGVFQLGGLVFVSEKSTSKKCPRCGAEELGLSEEKFKEAKFELRNMKCEQCSEEFHPDLIACINIAKSAFDFLNSK

SEQ ID NO: 61733 - protein, 529 aa, Unknown
  Microbial Source - Accession No. Ga0181858_1004277
MRRFSAAYRWTYRRLLEGYDPNVLKRADGPMTKLFGLGLKYNEGGRDLAKWKLGALKRLGQPPEKIVFGGRGLFRRLGRKGDLRSRLEAKRLWWERRNGLLYCPGDRSQPSGNPNLRLFWEHGALWLRILLEGTPAKGRYVDALVQTSSPYLEAIAEAVGRKGVAPIGVNLRLRDGKVYAIFTRSLPSPAPHITRQGGVLGVDVNARPLHLALAVAGPDGNLRRYLTLSLEEVDRIRERKRGESADALSDFYWKVAHRVVDLAKEEGTAIAIENIRNLPRGKRGDGNKRLRRALPRFAYRAVLERIVAVASREGVEVWGVNPAYTSVIGMLKYAPQLSLSKDVAAAYVIARRAMGLRERVPKRYLELLARPEHWERVAEWFASEWRALEARVREEKNEYKLRRYRQEQEELKNAWDYLRKFVESLEGAPGAPRRGPTGADALPSSGSQKEPEGGLLLWRALQVGVLRPLLGRKVPRDLSALKPLLVGGAWEGGGGERLGPDRCAGPTRTGARGLTALTLEDISRGEEVF

SEQ ID NO: 61734 - protein, 1522 aa, Unknown
  Microbial Source - Accession No. Ga0182014_10001887
MAEKNSKEQPVVTTQRAYTLRLSGTDKHDNSWCDRLWKTHEAVNKGAKVFGDWLLTMRGGLCHTLAEADVPGKGKKPARRPTQQEIKNRRIVLALSWLSVESKCGAPESYIVPHDSNTATGERKNWKTVEALREILRSRGLTEERAIEWADDCRDSLRATIREDAVWVNRSKAFDLAATNIGASLTREELWDFLQPFFANRHSYLEMDTVASATNGDSETDTEESKAASSDEKAKDLSQKAGQWLSSRFGTGPGADFSRFSKVYEVLATACRSIAPEVSGVEAINRLAIAIKKCSPSSNDIEGILGLISGPGYKSATRNILQQINRLQSVSEQDLSRLCDACEKDASQSRQKVGGKGSRPYADAILQDVERTCGICYARTEDHPSRHWQYAVILDHAARRVSMAHSWIKRAEEQRSKFEIEKNKLLRVPRDALAWLAAFCAKRSSDSGANDAYRIRRSAVDGWKQVVAAWAALPAKSEIAGSELRSDAERARIQVARELQDTVEKFGDIQLFEALAIREAKCVWMPDGKPDAQPLLDYVFGTDAIAKKQRFKVPAYRHPDAFLHPVFCDFGNSRWSIDYAVHRAPGKLTKARQLLEKKSAEISKAELALGKMDDALRHAAISETLQNLRAAYKQQQAEVAWLKTLQAITMGLWDGNGIQDTQLLWRSKRFGANIGQPDAVHPSPVSRADRFGRAVALAEDNVPVIPSGLFDLPEWNGRLQAPRRQLEAIAAMRDSAKLSAGEKQQLVAKRIHSIRWLVTFSAKLQSHGPFITYAEQHGFDWRYGMHGFENKSRQGLAKLILCRLPGLRILSVDLGHRYAAACAVWETLSTGQIQKSCGVAGMEAPGPRTLYLHLKQIVDGKEKKTIYRRIGADTLPDGSPHPAPWARLDRQFLIKLQGEDRDARPATSEEIAAVEHMENELGVVRQLKRKGRELLVDELMSDTLRTLRLGLRRHGERARIAFNLTAAKRIRPGGIQDVLDQEGRISLLKETLLLWYELYSGERWRDKPAEDLWNRHLQPLLGGAILPDTVDQEGNASAAKRRKQREETSENLRPVAEQIAKNDSLCRQLHVLWGAQWQTEDAVWRTRLRWMRRWLLPRGIKRDAQLRKSIRDVGGLSLTRIASFRSLYQVQKAYRMRFHPEDPERNIPKRGDSRLEGFGQRVLDAMERMRENRVKQLASRIAEAALGIGDEAGINSKDGRQKKRPTERSRDSRFVSCHAVVIEDLTHYRPDETRTRRENRQLMSWSSSKVKKYLSEACQLHGLHLREVSPAYTSRQDSRTGAPGLRCKDVTVAEFMKSPFWRKQVNTARENRGKENNGNARDRYLLWIDEKISADVTKETDSFLIPSDGGEMFVSAFEDNKAQPASRRKKPSALQADLNAAANIGLRALLDPDWEGRWWYIPCDAATLCPDAKKFIGCKAVDPSKPLRVVAEEGAMSASGIGSKKSGRKRNVATDETRIVNLWRDPSSMPVHLDASGSGEWQGYHEYKDNVQSRVIRNLKARYKQTWRQEYPFVPQDEDTPF

SEQ ID NO: 61735 - protein, 1437 aa, Unknown
  Microbial Source - Accession No. Ga0186994_110
RGADPSDTFWRKALWQTHEAVNKGAKVFGDWLLTLRGGLDHTLADAKVKTRKGQPDRDPTDEERKARRILLALSWLSAESKLGAPADFIVASGTEAQDERNCKVLAALEEILKARGLDPQEIEAWKNDCAASLSAAIRDDAVWINRSKAFDDAVKSAGYSLTREEAWDMLERFFGSRDVYLAPAKVSEDESSEAEQEDKAKDLVQKAGQWLSSRFGTGQGADFCRMAKVYGKIAAWADNAQGGMTGNETIKNLAAALSEFNPASKDLQGVLGLISGPGYKSATRNLLTQIAAKSFVTQQDLASLKDRAIKDAQKCNQNTGSKGRRPYSDAILKNVEALCGFNYLQDGGPARHSEFAVMLDHAARRVSLAHTWIKRAEAERRRFEEDARKIELVPEPIREWLDHFCSQRSQELGALEPYRIRRRAVEGWKEVVAAWSKADCKTAEDRIAAARALQDDPEIDKFGDIQLFEALAAGDAVCVWHKDGDPAIDPDPQPLIDYALAAEAEFKKRHFKVPAYRHPDALLHPIFCDFGKSRWDICFDVHKNVQTPFPRALCLTLWTGSEMKPVPLCWQSKRLAHDLALGNSEKKAEASEVTRADRLGRAASDVGKRDVVNIAGLFEQADWNGRLQAPRQQLEAIAKRVDKHKWDETAKKMLDRLQWLVTFSARLQPNGPWYVYAKEHGLREDPKYWPYADANKTRKGHARLILSRLPGLRVLSVDLGHRYAAACAVWEALTVEQVKEACQAAGHRDPNESDLFLHLKRKMRKQKKGNQVEVEETTIYRRIGADTLPDGMPHPAPWARLDRQFLIKLQGEEDGAREASNEEIWAVHQMEGELGRAVPLIDRLIAAGWGITEKQKSRIETLKRLGWRPVERPELGDESDSDEEDLYRPSLSVDELMSSAVRTMRLALKRHGDRARIAHYLIADEKTKPGGIREKLDENGRIELLQDALVMWHDLFSSRGWQDDAAKQLWDDRITRLSGYKAPEEIGEGVSGVERKKKQRENREKLQVVAKALTQNVSLRKDLHNAWKKRWEEDDERWRKQLRWFKDWILPRGKAANDPAIHKVGGLSLSRIATLTEFRRKIQVGFFTRLQPDGTRAGIKEQFGQSVLDAIEHLREQRVKQLASRIVEAALGIGSENKHHWDGTKRPRERIADRRFAPCHAIVIEDLTHYRPEETRTRRENRGLMAWSSSKVKKYLAEACQLHGLHLREVSASYTSRQDSRTGSPGIRCRDVPVKEFMRSPFWRKQVKQAEAKQAENKGDERDRFLCDLNAMWKDKTVADWEKAGIVRVPLRGGEVFVSAAPASPAAKGLQADLNAAANIGLRAFTDPDWPGKWWYVPCDPVSFKPIPDKVKGSAAINLDVPLKGDVPPKDVPAASGDVTRKKSGKIKSRSKEVVNLWRDVSSREISTTGIAWEVYAAYQNRVEKRVIEILRKSKCP

SEQ ID NO: 61736 - protein, 1374 aa, Unknown
  Microbial Source - Accession No. Ga0187028_105
MPETTQRAYTLRLQGHDPKDASWREALWKTHEAVNRGAKAFGDWLLTLRGGLDHSLADEGAPGQTPTEEQRKQRRILLALSWLSVESENGAPQEYIVPHDRDNESGARQNWKTREALREILKNRGCRDDEIESWCHDCEPSLTSAIRKDAVWVNRSKAFDNAVQSIPNFSREEIWDLLGCFFVSSQAYLAPLESPKDDKPDASKKDSSKDLIQSAGQWLSRRFGRGKGLNFARLAETYEAIARWASVANPGDTNDLIADLAKTLNAETPELDGILKVVSGPGHKSKTRNLLRSLSAVNHITKDTLQRLKDTANEDAKKAKLKKGEKGHRAYAYKVLEAVEDACGFTYLQEGDRAKHCEFAVMLDHAARRVSSLHTWIKRAEAERRRFEIDTKKKDQLPPSVKEWLDTYCQKRSKETGAVEPYRIRRGAIEGWKEIVEAWSKAGTTTAEDRKHEARRLPDNPHIDKSGDIKLFEDLALEDALPVWHANGDPNNPPDPQLLIDYVEGSEAEFKKRAFKVPTYCHPDPLVHPVFCDYGCSRWNVSFAIQPVKKQKLSSEEKLPAKGLLLDLLHGTAIRPVALRWQSKRFARDLALNTTDSSDKPNEVTRADRFGCALAKCPSSQKIRIRGLFEEKYWNGRLQAPRPELTALAKRVAKYGWDKKARKLRNSLNWFITFSANLRPSGPWEEYTKYAEKAFSSNASAKPSVSRGGFWVVHASPNKRGKMAQLRLCRLPELRVLSVDLGHRYAAACAVWETLSKSAFEQEIHERKILRGGTGPNDLFCHTQHDTNGQSKVTIYRRIGADTLPNGTPHPAPWARLDRQFLIKLPGEEREARKASPTELANVEKLEKELGLKTSENRVKRIDDLMSDTLRTVRQALRRHSLRARIAFNLATLRDQSDGDEESQSKQKRDTRWNNTVKIWHSLLESNEWTDDWAKALWDELGPLSDPQKADDAEWLKLAAEKFYTRWQEDEQTWRERLRWLRRWILPRGSQAASQKGSIRHVGGLSLTRLATIKTLYQVLKAYHMRLKPDNSRKNIPAEGDEALQNFGQKILDDLEHMREQRVKQLASRIVEAALGLGRMKQVTIGKDPKRPREPVDQSCHAVVIENLTHYRPEKRQTRRENRQLMDWSAAKVKKYLKECCQLHGLHLVEVSASYTSRQDSRTGAPGIRCQEVPLTDFLKKNFWREQVKQAKQRLSEGKANARDRYLCQLNERWGNAPAPVTQTAIRLRIPLNGGELFVSADQNSPASKGIQADLNAAANIGLRAITDPDWPGAWWYVPCEANTFKPVKDKVAGSAAIDSNVSLKKDSPNSEKPASDRKSRTSKSMINLWCDTSSKSLSEKDQWQESAPYWEDVAARTINILQASLACSTTNSQ

SEQ ID NO: 61737 - protein, 519 aa, Unknown
  Microbial Source - Accession No. Ga0187073_104
MNLTKSYKFKLIVTPEQHIFLENYFLRYAKAVNFYIKIIQIIRRDYQWLTKKEQIEGECNNCRKKVLLVYRFLPENKLLCPKCYNLHAGDYSLRKILYATRQRKRGKYDVRDAVSLAGTEYALSFKRAVDILKAIRKQIGSMRKFIKNRKERLEMWQEVLNDEKARFVVPRLEGQKAVRYKHIKLKDNPSRGKTESQIKKEIVALSKTIIKTEKSLRGIKSNFRGDIVDLQNTAIKKIDEDGAEITLDGGKRKFGLMIGAVRNEKGRKWLSDILKKIKESKPTYPMLLKQKGNFYLHYPISIDVAEPEIKTKTNYRVMGIDRGVNQIAVSVILDEFQGKPHNIKFYSGRDLMRQKIKFQLIRKKFTGTKNVNRRRAKFGKKLNRISTYLLHYISKNIIDEAKKFKPIVIVMENLKMIQGAKRPKKGSAAQERKINYIMSNFSYRKLQSLLSYKALQAGIPIRLISPEYTSQLCSKCSKPGDRTKGHFKCLNEKCGLQMNADLNAAINIANSYFKHSENS

SEQ ID NO: 61738 - protein, 1548 aa, Unknown
  Microbial Source - Accession No. Ga0187107_1033
MAELLEKTQRAYTLRLQRASGKCDICGKDDCSCWREALWNTHEAVNKGAKVFGDWLLTLRGGLSHTLADEPPLSDDDIEKELKALKKEAKANERNEPSFDDAKRSAEEKREARIRNKRIVLALSWLSVESERGAPQKFFVKHQRNEETNERSKWETEEELREILKNRGLNRNEIESWIKDCKASLSSAIRHDAVWVNRSKAFDELINNLMTHDEVWDMLGFFFKDQKTYVAPAEGPKDSEDEAADSEEEEAKDLVKNAGQWLSSRFGEGKGADFARMAGNYGKISNLSSQIMPGVTGKEAIEKLAKHLEVRDLAGILDLISGPGYKSATRNFLKEIDNKKIVTTEDLEKLKELAIEDQGKCKSKIGLKGRRSYSDMIMKEVEDACGFTYLQQNGPSRHSEFAVMLDHAARRVSIAHTWIKRAEARRRQFEEDAGRLSKVPPIISDWLDKFCSDRSEISGALEEYRIRRRAVDGWDKIVEKWAKCSSKEERIKAIEKVQGECQANDDKFGDAQLFEALAEDDAICVWHKNGNPQEEPDPQPLIDYVAAKEAEYNKRRFKVPAYRHPDPFMHPVFCDFGCSRWDINFAIHRASQELSETTQKIERKKAELEKAENALSKVEKLNDITKISPAHKKRDECREVLAEAQRRCAWLMSPRALSMKLATGNNKVVDITTLCWQSKRLAHDLGLNTKDSSGEASDVTRADRLGRAASGISDKDPVKIKDLFEEAEWNGRLQAPRGQLEAIARRVEKHGWDEKAKRMLDNIKWLVTFSARLRPYGPWVEYTKSFSEDSFPKPLVGAREYFVKYSDNDSRSSLSKHILSRLPGLRLLAVDLGHRYAAACAVWETLSAKKFQDEIAGKTILRGGTDANAIYCHVEDEKDGKKRTIIYRRIGADILPDGNPHPAPWARLDRQFLIKLQGEDEKARMARRNEIKKVERMEGEFGRFRKAPNNSECPNDEQGGNASSPACVDESGLPKRVDELMSEAVRIMRLALQRHGRRARIAYNLTAEDKLLPGGRKEKMEPEERVALLAETLADWHEICESRRWKDDFASSLWDEYLKAFDADIEAIKNAIEGEKDAVSDDEEETARARRKKREKLIAVLKPIAQKLADDMPLCKEISKRWAAYWSEEDEKIKKWLLWLRRWILPRGKKFATVRSIRRVGGLSLTRIATIKSLYQVQKAFRMRPEPDDPRKNIPARGDESLEDFGAKILKTVEKMREQRVKQLASRIVEAALGIGSENYEEHWEKKRKRPRRPIDDPRFRPCHAVVIENLTHYRPEETRTRRENRQLMTWAAGQVKKYLAEACQLHGLYLREIQPAYTSRQDSRTGAPGARCQDVPVTEFMKSPLWRRQVKQALKKSKEQSADARVRLLCELDEYCEKHKADWKNRQPEKKAEEKEPLLRIPLKGGEIFVSSDVNSPAAKGIQADLNAAANIGLRAIMDPDWPGKWWYIPCERSTFKPAKDKVAGSSAISLDEPLKKDSETDSSGAKQKRRKSGKKGSEIVNLWRDVSSKPISADDGWREFEPYWNAVTAKVVEILRQQSKEKDWPF

SEQ ID NO: 61739 - protein, 581 aa, Unknown
  Microbial Source - Accession No. Ga0187121_108
MDKEIQTFFCEKCNKEINIPKNLIGKENAIEKAKSKHNHKEHSLILGIKFKIYPEKKDIEKLNNYFDEYAKAVNFAAKIIDKLKEQFFFIGQKNKEQTGKKWIFPIEKCDFCGEEKEIVYQSKRGKKICKNCYMKEFSEGEIRKKIYSTKGRKVNPSYNIKNATNKLCATHYNYAPREAFQLLDALKKQREKRIRRLKKDKIRLRQFEEMLEQEDKRYELPKKGKQREPRFIHISLKDRASEFEGKGYTIKKIKDKIKTLRRNIEKEEKSLRKKSPIEFKGNRIMLTNNLKFDFEKDMVRIPLTKELTKYYKFSGLNVANEHGRKFFEEKLKLIKENKPKYSYLIRKQINKDKENPVYDYYLQYTVEFLPEIKTEYKGILGIDCGVNTPACVVLLEKGKEKPSLVKFFSGKDILKLKIRRRKQLYFLKGKHHKIMKQKRIRPIEPKINQILHTIAKQIVGLAKEKEVAISLENLEKPKKGKYKQSRFIRYKLSLFNFKTLQNYIAYKAKKEGIKVIYVPPEMTSQTCSHCAIKGNIHADTKRPYKNSYSLFKCNKCGIELNADYNAAFNIAQKGLKSLNSI

SEQ ID NO: 61740 - protein, 1353 aa, Unknown
  Microbial Source - Accession No. Ga0187143_105
MEIKTKNRQKTIWSEFTKQYSLNKTLRFELKPVNRTAYFLKQNKIFEKDLTIDDSYNQAKFYFDKLHQKFVNEALLSDKVKEINLEEFAQNFFALREEVKKLKESQEREKTYTVENKINKLKNEYFKKIKLLLDRTANDWKEKYKERGLKFNKTDFKKNGTEFLMKSGVLKILKYEFPKEKEEEFKNNDWPSLLIEDKANPGNKVYIFDSFDNFTTYLLKFQETRKNLYKDDGTSTAIATRIISNFEKFLNNKKIFDEKYSTFWGKIGITKEEKEIFEVNYYYNCFIQKGIDKYNETIGQINRKSKEHRDKNKIDKSQLPLFKKLDKQILGEVIKERELITKTENETEEQCLIKRFKEFINQNKERIDKAKNLIKDLINSNFESEYAGIYLRRAAVNTIANRWFKNPTEFLLKLPQTSKSKENKESPKIKTFISLLDIKNALENFEGNKDSLGLIFKDRYYKNEQNENKPLEINNQESYWMQFLKIWNYEFSQLFEDKFNEKGVQIFWGYTENLEEQAERLNSFSRQKDEIQIIKNYCDASLKIYQMMKYFVLEVKNEKDVPVDYSTEFYNRFDEYYKDFEFIRYYNAIRNYVTQKPSNEHKIKLNFESGSLLTGFDKNKESEKLGIILRYRNSNKYFLGIIHKEHNKIFDSKNESKFIGDSDEDLYEKMELKLFPDPKKMIPKIVFANGNKKDFGWTQEIQDIKTEFKVFQENKKENKDIKFDKSKLAKLIEYYQNCLERAGYKKEFGFEWKKADEYQSMSEFNQDIEKKNYKIKFIPIKDSYIEEKVQSGELYLFEISNKDFVWPNQKKNIHTLYFLNLFSDKNIQKPIFRLGANAELFYRPKCERIVKEKRGKKEIIKYKRYTEDKILLHLPIEINYGCFKAPNTKQFNKKFLEFFNDHDDEINIIGIDRGEKNLLYYIVINRKGEILEHGSLNGINGVNYFEKLLEREKERLINRQSWEPVVKIKDLKKGYLSYVVRKIADLVEKYNAIIVLEDLNFRFKQIRGGIERTVYQQFEKQLIDKLSYLVFKDNRNPEEPGGILNGYQLVAPFTAFKDLGKQTGIIFYVSAEYTSKTDPLTGYRKNIYISNSASQKKIKDLINKLKDFGWDEKEHSYFFTYNQKDFDSSIDKEWTLFSKVPRVRREKDNKTGYWEYKPIDLNKEFKDLFEKYEINKESNDILSEIKSLIKNNEEILTQKKEFDGKSKNFYERFIYLFNLLLEARNTISFQVKLDTQGDELKLEEIDYGVDFFASPVKPFFTTSGIRFISKQNRDGKTEKEKKEEFTKENFPDFKNLFKECSPENFDSDGVGAYNIAKKGIILLERIKENPEKPDLYISKEDWDNFAIENALIK

SEQ ID NO: 61741 - protein, 1544 aa, Unknown
  Microbial Source - Accession No. Ga018764_10009485
MADENGREQPVVTTQRAYTLRLSGTDKNDNSWRDRLWKTHEAVNKGAKVFGDWLLTMRGGLCHTLAEADIPGKGKKPALRPTPQEIKNRRIVLALSWLSVESKCGAPESYIVPHDSNTATGERKYWKTVEALREILRSRGLTEERADEWADDCRDSLSATIREDAVWVNRSRVFDLAATKIGASLTREELWDFLQPFFANKHSYLEMDTVASATNGDSGTDTEESKVDSSDEKAKDLSQKAGQWLSSRFGTGTGADFSRFSKVYEVLAAGCQSIAAGVSGAEAINRLATAMEEYSPHSKDIEGILGLISGPGYKSATRNNVLPQINSLQRVSQQDLDRLRDACEKDAVQSRQRVGGKGSRPYANAILRDVEVACGICYAKTAGGPSRHWQYAVILDHAARRVSMAHSWIKRAEEQRSKFEIERNKLDHVPHDARAWLDAFCNRRSSESGATDAYRIRRSAVGGWKQVVAEWAALPATAENAGSELLSGPELARIRAARELQDTVEKFGDIQLFEALSATDARCVWQPDGKSDAQPLLDYVAGTDAISKRQRFKVPAYRHPDALLHPIFCDFGNSRWSIDYAIHRAPKELTHAKQLLEKKKAEIDKAELTLAKANGTAKRADISEKIKSLRAAFIQQQSKVACLDSRHAMTMGLWDGSRIEDTPLRWQSKRFASDIGQPLSAHSLPVSRADRFGRASVAAEDNSPVKPSGLFDLPDWNGRLQAPRRQLEAIAAMRDSAKLSAGEKQHLVAKRIHSIRWLVTLSAKLQALGPWFEFAGPRGLLEYRNGEVVLSPRSSKDSWRGLAFPFWHPHNLKGRGGAVRHVLSRLPGLRVLSVDLGHRYAAACAVWETVSTGQIQKACLDAGMEAPGPHPLYLHLKQIVDGKEKKTIYRRIGADTLPDGSPHPAPWARLDRQFLIKLQGENRDARPATSEEVAAVEQMENELGVVRQLKRKGQELLVDELVFDTLRTLRLGLRRHGTRARIAFNLTATKRIRPGGIQEVLDQEGRLSLLKETLLLWYEVYSGERWRDKPAEDLWNRHIQPLLGGTILQDTVNQEDIPSAAKRRKQREETSEKLRPVAEQIAKNDSLCRQLRVLWSAQWQTEDAIWRTRLRWMRRWLLPRGIKRDAQLRKSIRDVGGLSLTRIASFKLLYQVQKAYRMRPHPEDPERNIPKRGDSSLEDFDQRVLDAMERMRENRVKQLASRIAEAALGIGDEAGIHSKDGRQKKRPTERSRDSRFASCHAVVIEDLTHYRPDETRTRRENRQLMSWSSSKVKKYLGEACQLHGLHLREVSPAYTSRQDSRTGAPGLRCNDVTVEEFKKSLFWRKQVGAAEKNREAGNKGDARERYLLWVDEKISADETKETDSFLIPSDGGEMFVSAFEDNKTQSASRRKKPSALQADLNAAANIGLRALLDPDWEGRWWYIPCDAATFCPDTKKFIGCKAVDPSKPLRVVAEEGAISASGIGSKKSGRKRNAAIDGTRIVNLWRDPSSMPVHLDASGSGEWQRYHEYKNNVQSRVIQNLKARYKQTWQQENAFVPQNEDTPF

SEQ ID NO: 61742 - protein, 347 aa, Unknown
  Microbial Source - Accession No. Ga0190309_1003062
VEKDETIKLTVKAVIPPRDKGLRKLMREYKAYKKALIPKVREAVRNVIKDKSLRVYSQQKWMVDKKLNEYLKNLPFHPMPFHNQSVWIQEKEGVFWIHFKTKEGEAVCYLKVPEKYRGFVKKACGRDNPVLGQVELIEDKKYGWVNCHIVLRLPKPEPYKPKAWVGVDIGWNKLATSIACTVNPHLRFFKPTFHGKQFKTRIIQLRYLLKQYARKGKAWKKWDYRLKHTIKYAIGVVAKEIVSKAKKLKAGVAMEKLTFKSVTKGYLVPRYKLTIAVKTLCEREGVPFKLVPAKYTSIICPKCGYTNKKNRNGERFNCLRCGYKADADIVAAMNIAKRAITAPQMEG

SEQ ID NO: 61743 - protein, 591 aa, Unknown
  Microbial Source - Accession No. Ga0190334_1000016
VVKQTTFFCKECNKNINIPRNIIKKLESNHISQDQAIKKAKERHNKKKHSLILGIKFKLYVKNKEDKEKLNSYFEEYAKAVTFAAQIIDKIKSGYLPQWKKDKKLKRIIFPKGKCDFCGTKTEIGWISKRGKKICKNCYSKEYGENGIRKKLYATRGRKVNPSYNIFNATKKLAATHYNYAIREAFQLLEANRKQRQERIRRLLRDKKRLREFEDLIEKPDRRIELPMKTRQREKRYIHISQKDKINELRGYTLHKIKEKIRILRRNTEREERALRKKTPIIFKGNRIMLFPQGIKFDKENNKVKITIAKNLPKEFIFSGTNVANKHGRRFFKEKLNLISQQKPKYAYLIRKQTKNSKKITDYDYYLQYTIETVYKIRKNYDGIIGIDRGINNLACLVLLEKNQEKPCGVKFYKGKEINALKIKRRKQLYFLRRKHNRKQKQKRIRRIEPKINQILHIISKEIVELAKEKNFAIGLEQLEKPKKSRFRQRRKERYFLSLFNFKTLSTFIEYKAKKEGIRVIYIPPERTSQICSHCAIKGDVHTNTIRPYRKPNAKKSSSSLFKCKKCGVELNADYNAAFNIAQKSLKILST

SEQ ID NO: 61744 - protein, 1341 aa, Unknown
  Microbial Source - Accession No. Ga0190361_1000443
MNKQNTKQEIWSRFTRLYSLNKTLRFELKPVGKTADFLKQNKVFERDKTIDDSYNQAKFYFDKLHQKFINEALKKKNVRGLDLKDFADKFLQLKNEIQILKQKGERNKIYQTEKEIADLRSKYYRQIKSFLDKRASDWIESYRRKGVKLHKTDLKQNGTDFLTKAGILGILKYEFPKEKETKFVKQCWPSLFVDDKVDLGNKVYIFDSFNNFTTYLAKFQETRKNLYKDDGTNTAVATRIISNFERFLSNKKIFDEKYKNLKGIGLAKGQMKIFKHDYYYNCFIQEGIDKYNKILGEINKISKEYRDKNKLDKSQLPLFKTLDKQILGEMVKKKEIITKTENETEAQSFVKIFKELITKNKAKIPKAKLLIDDLTNGKFENDYEKIYLKRQAINIIANKWFRNPTEFLSKLPQSSKSRKDGESLKIKSFISFLDIKNGLEELDDERDYLGRIFKDKYYRDENNNEVLLNENVRESYYSQFLKVLKYEFESLFKDKFEIKTDKKEKQIFWGYTRELESKAEKLSSFTREKISLVKNYCDASLRIYQMMRYFSLETKSEKDIPVDCSTEFYNRFDEYYKDFNFIRYYNAIRNFVTKKPFDDDKIKLNFESGNLLTGFDKNKESEKLGIFLRRDNKYFLGIINKEHNKIFDEKKYPELKGKATDRYEKMELRLFPNPKRMIPKIVFADKNVKEFGLSENIKRIKEDMRVRKENKFSKDKLIKLIKYYQDCLKKGGYKKEFNFTWKNADEYQSLSEFYSDIEKNNYKIKFIKISDRYIDERVAKGDLYLFEISNKDFVWPNKKKNIHTLYFLNLFSDENLNNPIFRIGANAEIFYRPASLKPKKEIRGRHKKKIIKYKRYTEDKILFHLPIVINATKGSLKQRQFNKRLNQFIAKNKDRINIIGIDRGEKNLLYYTVINQQGEILEHSSLNEINGVNYFNKLVEKEKERQLNRQSWEPIVKIKDLKKGYISYVVRKIADLVEKYNAIVVLEDLNMRFKQIRGGIERTIYQQFEKQLIDKLGYLVFKDNRNSQSPGGILTGYQLTAPFTTFRDLGKQTGIIFYTTAEYTSKTDPLTGFRKNIYISNSVSNKEVIKLIEKMKIGWDKKEKSYYFIYNQKDFNSLIDKEWIIYSKVPRVRREYNKKSGKWDYKLIKPENLNQLFKELFEKWNFKNIKSNNLKFEILQRKEELAKNRHIIDDKEVNFFQRFIYLFNLLLQIRNTISLNFEFDSYSRRLKQIDYGVDFIASPVKPFFTTAGIIYLGKESNENKIEKDQKKILVGKNFADFEKLFKNCSSDGFDSDGVGAYNIARKGIMVLERIKENPDRPDLYISKEDWDKFVINNSLVK

SEQ ID NO: 61745 - protein, 541 aa, Unknown
  Microbial Source - Accession No. Ga0190361_1001609
MITLQARLQIENKNLLILENLMRRYCSAYRYAYNRLLEKKNENDVRKEIQKIFNLHSNYAESAVNEAKALIFSCKERGQNPKKVIFGGRLLFEKLSKKHLTGKKREKLKEKWKEKRQGVLYAIGRKHRKGNLNLRLVEIENNLYLRINTGKKEWIYAKIIRKVKRNKDKWIDFIQRLKLAEKTKEYFPYTVKILKRDKKFYAHISFEEILPEKLKITKENGIIGIDVNASPFHLALATSSKDGNLLSYKKISLHELINANKNKRKYLEWLTAHEVINYALKNNKAIAIEKLEGLKNEKRGSGRAKFRKRLQQFCYRNILEKIKILAKREGIEIIEVNPFYTSVIGKLKYSPLYNIDKDTSAAFVIARRALGFKEEIPENYKNLLKDEDFLSYAIAELEEKVEEIKEKKNKEKNKYKRNVIKTELKKLKNELNLLKKHLKDLKSGKREPATQQPVNLGKKQVRGKLSGLLKSWRVLSAALTVPYLEKFLQVNGTCRDFSPLKKLLIKGDWIRAVSRLVPDSGQGRNFYKFGKQLNIFEKLVS

SEQ ID NO: 61746 - protein, 340 aa, Unknown
  Microbial Source - Accession No. Ga0190361_1003780
METVKLTVRAVIPPRDKGLRKLMREYKAYKKALISKVREAVREVIKDKNLRIYSQQKWMVDKKLNEYLKNLPFHPMPFHNQSVWIQKKDGRFWIHFKTKEGEAVCYLHVPAKYQSLIEKASGENNSILGQVELIEDKKYGWVNCHITLRLPKPKPYEPKAWLGVDIGWNKLATSIACTCNPHLKFFSPTVHGKQFKTRIIQLRYLLKQYSRKKKAWKKWDYRLKHTIKYTVGVVAKEIVSKAKKLKAGVAMEKLTFKSTTKGYLVPRYKLTIAVKTLCEREGVPFKLVPAQNTSITCPYCGHKDKKNRNGERFKCRKCGYQADADIIGAMNVARGVINGL

SEQ ID NO: 61747 - protein, 390 aa, Unknown
  Microbial Source - Accession No. Ga0190361_1003780
MEKNETVKLTVNAVIPPRDKGLRKLMREYKAYKKVFISRVKEAVKPVIKDKNIEVYSIQKHLLGKKLTEYLKNLPFHPMPFGNQSYWLEEKDGNFWIRIKTKDGEAVCFLKVPSKYQHIMKKASGKTCPYQTNGGCEFATCPFNTPKMCSKINPHLGEMELIEDRKYGWVNCHIVLRLPKPEPYKPKCWVGVDTGWNKLATSIACAVNPHLRFFNPTFHGKQFKTRIVQLRYLLKQYARKGRAWKRWNYRLKHTIKYAVGVVAREIVSKAKKLKAGVAMEQLTFKSTTKGYLVPRYKLMIAVKTLCEREGVPFKLVPAKNTSITCPKCGYKEKKNRNGEWFKCLKCGYQTDADLAGAMNIALRALTATRMEGLESQLSTATYILGELTVL

SEQ ID NO: 61748 - protein, 350 aa, Unknown
  Microbial Source - Accession No. Ga0190363_1000125
MGSQPTIKITVKGVISPRDLGLGKLMREYVVYKKVLISRVKDAVRQIVKDKSITVYAQQKWMVDKKLNEYLKNLPFHPMPFHNQSIFIENRNGHFWIHFKTKQGEAVCYLRIPEKYYPLIEKACGTTFGENPVLGQVELIEDRKYGWINCHITLRLPKPEPYKPKGWLGVDIGWNKLATTILATKNPHLKFCNPTVHGKTFKTRILQLRHLLKEAQRKRNAIKKWENRLKNTIKYVVGFTAREIVSKAKRLEAGVAMENLSFKSVTKGYIVPRYKLIVAIKTLCEREGIPFKTVPAQNTSITCPYCEYTNDKNRVGKRFQCLKCGYQADADIVGAMNIAKRAYDSYPDGG

SEQ ID NO: 61749 - protein, 483 aa, Unknown
  Microbial Source - Accession No. Ga0194111_10067953
NKFVFTSGECDYCQKQNDISYVHSRSGKKICRSCYDKEFSVNAIRKKVYPTRGRKSNPNYNIFNATHKLSGTHYSYAVDEAFQLLEANKRQRQQRIKRMIKDKRKLREFEDIAKYSDKRYELPMKERQREKRYVHISQKDRANELKGYTMAKVYGKIKILRRNTEREEKSLRKKSPIISKGKRIMLYPQGVQFEREKNKVKVSISKDLPKEFEFSGTNVASAHGRLFFEEKLKEILKQKPKYSYLIRKQINKDKDSPKYEYYLQYTTEIPPKAEISYKGVIGIDRGSNPNLAVLAFLEKEKDKPSIVRFIRGSDIVALKVQRRKHLYFLKGAHNKKAKIKNIRLIEPRIQQILHTKAKEIVELAKDKNAAIALEQLEKIKKSKFRQRKIEKFRFSLFNFKTLSTFITYKAKKEGIRVIEVPPEMTSQTCSHCHSVDTQRPYKKPNAKFASYSLFKCNKCGVELNADYNAAFNIAQKGLKILNS

SEQ ID NO: 61750 - protein, 462 aa, Unknown
  Microbial Source - Accession No. Ga0207429_10023
MIGGINVAKRKRDKNAVVKTLKIELVDVLNYEPPPKKDGEEYSEKEKRRELIKELRRLQRKVAQASNYISREYFLWELKRREAEEKGIILNEKQELGTTLQNKGYRIAAEVLKGFNTENIAVLSSQLWENWKKRVSDVFNGSMSLPSYGQKQPIPINKKNYNIIPYKNNKYMIEITFYSPSEGRNRKLQFITANLNDYSQNIIKNILSQKYRKGSANFIIENNPNKNLSSQKIFFHISYEFIPQPQDESTENILGIDLGLKNVVAMQVYNPKKQEFEYIKYNDCIIEGGELVAIKRKIEALKHKKGKATKWKGEGNTGHGRKKKMKMVYSIGKKISQIKNTYNNKIAKYIIDFALKHQCKYIKMEKLTSHGFENTLLQEWRYYDLQTKIKNKAKENGITVLFVNPKYTSQKCSVCGYINSENRKTRDNFKCTKCDNEMDADINAARNIAVSEDIIKEDDEED

SEQ ID NO: 61751 - protein, 401 aa, Unknown
  Microbial Source - Accession No. Ga0207433_10006213
MEEQLKLCVRAVIPPKDVGLRKLMHEYVVYNKVLIPRVKQAVRQVIKDKNITVYSQQKWMIDKKLNEYLKNLPFHPMPFHNQSVWVQEKDGKFWIHFKTKQGEAVCYLHVPAKYHSLIEKACGEDNPVLGQVELIEDQKYGWVNCHITLRLPKPKPYEPKGWVGVDVGWNKLATSIACTCNPHIRFFNPTFHGKKFKTQIIQLRHLLKQFQRKDTNVNKWENRLKNTIKYAVGAAAKEIVSKAKKLKAGIAMESLTFKAVSKGYLVPRYKLMIAVKTLCEREGIPFKLVPARYTSITCPKCGVKHEKNRQGKRFRCLKCRYEADADVVGAMNIALKAFDSFPDGGENDVGFTPASKADRGLPREVGHVASPQAPMNDDSYKAGRKHNKIENEVRKEGLSRL

SEQ ID NO: 61752 - protein, 1008 aa, Unknown
  Microbial Source - Accession No. Ga0207433_10011113
MPQQPTTQRAYTLRLRGADPNETSWREALWQTHEAVNKGAKVFGDWLLTLRGGLDHALADTKVKGKKGKPDRDPSAEERKARRILLALSWLSVESKLGAPADFIIASGEETAEARNAKVIAALEEILRSRDVAEEAIGDVTKKPEDQPGTWIGDCAPSLTAAIREDAVWVNRSKAFDEAVKSIGSSLTREEAWDMLERFFGSRDAYLAPAKGSEDESSETEQEDKTKDLVQKAGQWLSSRFGTGKGADFCRMADVYKKIAEWADNAQADTTGNDAINNLAAFLSEFNPASNDLKGVLGLISGPGYKSATRNLLTQIAAKATVTQQDLARLKDTATEDARKCYQNTGSKGQRRYADSILKDVESVCGFTYLQEGGPARHSEFAVILDHAARRVSLAHTWIKRAEAERRKFEEDAKKIGQVPKAAKDWLDQFCLERSGVSGAQEPYRIRRRAVDGWKEVVTAWSKADCKTAEDRIAAARALQDDPEIDKFGDIQLFEALAEDDAVCVWHKDGDAAKTPDPQPLIDYALAAEAEFKKRHFKVPAYRHPDALLHPIFCDFGKSRWDICFDVHKNTKTPFPRTLCLTLWTGSEMVSVPLCWQSKRLARDLALDHGRQDLGSPKVTRADRLGRAASNVTENDEVKIAGLFEQADWNGRLQAPRQQLEAIARYVAKNGWDEKAKKMRDAIQWLVTFSAKLQPNGPWCAYAEEHNLNKDPQYWPHADTNKDRKSHARLILSRLPGLRVLSVDLGHRYAAACAVWEALSDKAFKEDLEGKKIIRGGTSDNSLYCHTEHEVNGKKHITIYRRIGADTLPDGTPHPAPWARLDRQFLIKLQGEEEGVREASNEEIWQVHQMECTLGRKTPLIDRLVAAGWGSTEKQKARLDALKNLGWKPVEKAETSEDADTEEEELSFRPSLSVDELMSSAVRTMRLGLKRHGDRARVAYYLITDEKTKPGGIKEKLDENGRIDLLQDALVIWHDLFSSRGWRDDAAKRLWDENIARLCGYKAPEEIG

SEQ ID NO: 61753 - protein, 1384 aa, Unknown
  Microbial Source - Accession No. Ga0207433_10012523
MTNNIKNQKSIWSEFIKQYALNKTLRFELKPVGRTEDFLKQNKVFEKDKTIDDSYNQAKFYFDKLHQKFINEALFSESVKSINLKDFTEKFLGLKSEIQKLKSEKKQEEANKKEKEVNDIRNDYYKKIKSLLDKKAEEWKKKYKDGGLKFRKTDLKQKGTDFLMKSGILGILKYEFPKEKEEEFKNKDWPSLFVEDKANPGNKVYIFDSFNATYLLKFQETRKNLYKDDGTSTAVATRVISNFEKFLNNRKIFEDKYINHWKEVGITEEEKKIFETDYYYNCFIQGGINKYNDLIGQINQKTKQYRDKNKIEKSELPLFKVLDKQLLGEVIKERELITKTENETEEDVFVKRFKEFVDRNKQRIPRAENLMNDLINEKFESDYYGIYLKRAAINTIANRWFKNTTEFLLKLPQASKSKENKESPKVKPFISLLDIKNALDDFEKEKESLGTIFKDKYYKTKESDEAPLNNDSQESYWKQFLKIWGYEFNQLFEDKFNEEGIKIFWGYAKELIEQAENLNSFSRKKEEIAVVRNFSDAALRIYQMMKYFALEAKKEDDIPLDYSTEFYNRFNEYYQDFKFIRYYDAIRNFVTKKPSSEEKIKINFESEELLRGWDISKIKGCLGIILIKDNEYYLGVVKKEKDKLFDYYENKNDTEKDIQRKNHLKKEIIAKPNEDYYIRVKYKQIANAGKDIYNLVLMPDGNAVRFTKKEKKEKYWPEEIKRIKKEGSFKNNKRDLVKFIDYFKKCASIYWKEFNLRFKSSEEYENFKEFTDSINIQGYKISLDEENENKIKSEYIEKQINEGNLYLFKIINKDFCKNKKQNSKKNIHTLYWEYLFSKDNLIKNEYPIIRLSGGAEVFYRKAFNVKKEPVVLKRGNSEKPALRENKPIFHLNRYLEGKYLFHCPIQINATAISNISNKVFSQKINNFISDKNEINIIGIDRGEKNLLYYTVINQKGEILAHKSLNEINGVNYLEKLIEREKERQIDRQSWEPVVKIKDLKKGYLSYVVRKIADLAEKYNAIIVLEDLNFGFKQKRTKIERTIYQQFEKQLIDKLGYLVFKDDRGSESPGGVLNGYQLVAPFTTFKDLEKQKQTGIIFYTNAEYTSKTDPITGYRKNIYISNSASQKTIKENLINKLKALGWDEKEKSYFFTYNQKDFGSPISKEWTLYSKVPRVRREKNNSNGYWDYQPIDLNEKFEDLFEKYGINKKSSDILSEIKELIKNNEEKLIQKQEFDGKSKKFHERFIYLFNLLLEARNTMSLKVKLDKRGNEIKLDEIDYGVDFFASPVKPFFTTAGIRFIGKQNEDKKIEKQIKEKFAEENFADFKGLFKDCSSDGFDSDGVGAYNIARKGIMILERVKQNPQKPDLYISKEDWDDFVLKNAIIK

SEQ ID NO: 61754 - protein, 1239 aa, Unknown
  Microbial Source - Accession No. Ga0207433_10020534
LLGLDPATTDFADCAKRVLRNNGATAEARAAALFQLLQEANASANASDLNQMCVSRLPWFNITLTGKLNRQRLNQMCVSRLPWFCTPKGQLAATPKTVVAQQENAMLAIIRDVHEAAPADLKTVAQRLEPGYFVTQFPKQQMTGDEARAEAERLFAACQKKFKELAEYEDGYRQCLDALGPNLSLPRLGRKPKGAYPYAVVFKLMPTNATWECFKRVTASLYKRAQKGVVSPVSADSIADVRTNDEPLFEYFTNLALVRPPGNKDRAVWFEFDLAAFIEAIKSPHQFFQDTIKREQAVAQIKAKLDAMDGQGRAASGEEDALPGFEGDDRITLLRELVTDTLGYLAEADASTSPGGKIEYSIQERTVRGFAEVKRRWRDLVEKGKATEDALLKVLAEEQTEHRDDFGSATLYRELAKPKFQPIWRDPGTQPWHADDPLRAWLEYRELGRELEDKQRPIRFTPVHPVHSPRFFIFPKKKGGGRFGTVHEPGQLRVMAGIVAQTQHGWEPVPVRITYAAPRLRRDQLRDDVETDLESRPWLQPMMQALGLPEPDTADFSNCRVTLQPSAPDDIQLTFPVDVSADKLTTAIGKAARWAKQFNLFPDGDNFYNASLRWPHEKKPSKPPVPWHEALDNFSVLAADLGQRCAGAFARLEVRANDDFAGKPSRFIGETPGKKWRAALVAAGMLRLPGEEQTVWRPGATGPNFHTELSGSRGRMARPHEADDTADLLRAFDCPEESLMPADWRTSLSFPEQNDKLLVAARRYQSRLARLHRWCWFLTDEKKRQTALDEIREAEDMPAADDPQLTDKLRALLLQKQAALPGLLVRLANRILPLRGRSWQWETHPDKADCHLLTQTGPALPDVWIRGQRGLSMQRIEQIEELRRRFQSLNQMQRREIGGKPPIRRDDSIPDCCPDLLDKLDQIKEQRANQAAHMILAEALGLRLAPPPADKRQLRASRDVHGQYVKSREPVDFIVIEDLSRYRSSQGRAPRENSRLMKWCHRAVRDKLRELCEPFGIPVVETPAAYSSRFCSRSGVAGFRAVEVGPGFDREFPWMMLKDREDEGEPVRQLILQVATLNQGRDGKPPRTLLAPLAGGPIFVPIVDKLNGADIQPALAQADINAAINLGLRAIADPRLWSIHPRCRTQRQGDQMLTREKRKFGETGQPLAVHRADGVKPDDTRNPNFFADISGSLPAWESATLDGQHLLSGRCLRSEIKKRQWQRCAEINDRRMNRWMKGE

SEQ ID NO: 61755 - protein, 591 aa, Unknown
  Microbial Source - Accession No. Ga0207433_10021674
MTETLEILETPGETGRDEEKTVIVRQYGLLPPVDWDQDCQEHLWFQNRLWNTLVELERKHREDYFRLTGEDPELREIEDVLKALVEEKEALIGEKKALRQAARKKAGVDTAAQDLRIAEIRPEIRKLAGLAKEKRKEVRERLKPELDRLEEKRREAVKSARNASGLWWGNYNAVCASYETARSRALKSGAELKFHSFDGTGRFTCQIQGGMTVAEFFSGDRAAIVSADPVSPDAFWHPSRGERRRAARTKLRMTVFTTKDEKGHYVRRILTFPMILHREIPSDALIKQVVVSRKRVGTEFRWTVTITATRSGPPAVRADNAGLCGVDLGWRLVPEGLRVASIADAKGVRHIVLPEKMLRRMDHVEDLKSQIDQDTNRLLLWFRSRWPEISESFPEEIRERFLRHVRSPKVSARHLSGSVLAWRDNHGDFRPDLLAALETWRKSNKRLTQEMDNLRDKLSAQRTDLYRNEALRIVREHSVVGVEDFDLREVVKLEMPDGEKTTQPAAARANRVRAAVSDLRNWIRIQAAKTGSTVVRIPSADTTRACRTCLHVNRAGNPEDLIWKCDGCGAVWDQDENAAKNILRTVEVANG

SEQ ID NO: 61756 - protein, 1189 aa, Unknown
  Microbial Source - Accession No. Ga0207433_10022806
MLPFGAGALIIILNMQKGYNLHKKRIDLLNGEILRTIKYPLKPLNENSEKNKKQFELQIINDDLKIRGDLNLNDYLNYTFKNNHIYNLFDFWIDSLKCGVIWQPSFNNLKNLIEKIYLNKTISEEIFDNSIPEIKKFFDKNKFIENFILRTGIRENKSKKSFEKDLIKSLNDEFNKEEINKEAQDLIDKIINTFFNENKLKKLTIEEQNNLWLNKFNIDKSKLKTKELKYNYTFFIIPELIKFKENNLENLLNIRYEFIKNKNLNIEILQEILGLENNFNSFSNYFNEIIKNLQNDEYNLIYEDFISFYKFTNEEKEKILQSLKYLSEKSKQLGSPQILNLSWADYRSILGGKIQSWFTNYLQRKEKLEEQLNSLKENINKTKEYLLENFQENTDLKEIIYFLDKLFELSEVSKINNLFFDIHSTCKLKINNFFQKNIKQNEDDTVESNENLKGIFEKIYKPLNFYGQSRRENNIKIINSLQTVELGIIYTKKILNFLKNDLDFNKEENFEEIYRKNLNFLWNKLKENSLNSKNFKSKYKEIIIKNLNSYSNIKFEKIIKRPSYYVFYKSIYSKGTNLQIEFNKEINFKNIFIENINELYNFLINLEDKEIITDKNLLLDWIELSKNISSYFIKFTNIEKINLKEIFKDKDLNFFSNIAKYFETFGNVVEKQGLSYFVQSIFFSEFKGAATLYTKNKYLAKYNIQIIHSNEKFPLYYYSNNLKNHNKLLNPKDLIREKHNYFVSLKKIKILKNKDLEFLLLNKDNFQKIYNSFEDNKNDLLKLESSFYQIQFLEKFIYKPKNWENSKIELSEWSFILEKEYEIKWDLENKIPILNEIQNSKKNKLYIAIPFKISSYQKEYEEIKKSKENYILGIDVGEYGIGWVLINYKNKELKIINKGFFVSKNIAKIKDEFSKIQKKSQKGIFNESSNLISEIRKNAIGELRNKIHSVFIFYHSKNICYEYSINAFETGSGKTTAIYKSIKKSDTLSIIDADKKEQMHIWGKKLNKEIEIGKNLSSYASSYICSKCGKSLYQLKETDLENNEIKIIEREGNILKIKTPYGNVYAYSSKKEHQVDFIFNKTKSSFKELQKIMKDFARPPLNNNSEVIRKFTNLKENEIDILHQKRGSSCVFVCPFCLHVSDADIQAALMMSIRGVINNETKSKGEKIDYFQKNLEFLNELKEKPVIDL

SEQ ID NO: 61757 - protein, 396 aa, Unknown
  Microbial Source - Accession No. Ga0207433_10030792
LETIKITVKATIPPRDPGLRKLMREYTVYKKVLIPRVREAVKEVVKDRAVAIYADQKWLVAKRLLEYAKNLPFHPMKFSNKSYWVEWSEGFLLHVKTADGEAVCNLNVPLKYRSLLQAASGKACPYKGKCKPCPFNTPKMCDKINPHRGEMELIEDNKWGWVNCHITLRLPKPQPYEPKGWVGVDVGWNKLATSIVCTRNLQVRFFNPTFHGKTFKTRIIQLRHLLKEYQRKSRSVKKWGNRLKNTIKYAVGVVAKEIVSKAKKQKAGVAMESLTFKPVSKGYLVPRYKLMVAVKTLCEREGIPFKLVPAQYTSITCPKCGYVDSKNRNSEWFKCLKCGYQTDADLAAAMNIALKALNSSPNGGENGVRHALTPKTDEATRLRGAECCDPHKGDEQ

SEQ ID NO: 61758 - protein, 615 aa, Unknown
  Microbial Source - Accession No. Ga0207433_10045901
MLALKLKLDPTSEQMTVLDKMFWKWASICSRISAGKGKVTLEKLAPSESVTGIWFSKTQLNQAKTDVSDLVSALKKSAKQKEKSLGRDEERAREIREAIDHPESRDVNPERASNFRIKAWVQKTGNLSQKYHTIKYWQGQLKRLENAIQKRKQTIETIKKGRIHFKPTRITLHQNSFQISFGKNKLLLKPFHKSPSAQPPLEVPIITYPQQPLVGHNGGKSSQRSLEFLEHGILEFLAFALDKRFFGMNDAEKMLLKAKKPEKLLIKEAKLAKKKEAFNSKIKEVQKMLGRELDDNEKKILLEESKRFFKDIEAYRPNADYIKLLKKLADELFRKEDYFSPNKYPILVRKPINKYKVKKFSNLKPIDWEYFLQLSYEPFGAEPIAAKTVMGVDRGVKHLLAVAIFDPNTKTFTFNKLIENPVIGWKNRLKRLRKAIQRLERRTRVKTGEHILENQLKIKLKSIENRIKNLYHNISANIVKIAKDNQSVIVFERLEGRGLKQHGRSKGKRMKALNYFLSNFDYGKIASLIKYKADKEGVPVFDINPAYTSQNCAKCLLESGNLSDSEKNYYRDKNNSKIGYCKKHGYIDADLNAARTIAVCYDKGLNEPMPFDSRK

SEQ ID NO: 61759 - protein, 319 aa, Unknown
  Microbial Source - Accession No. Ga0207433_10075234
MRVSSLYRTVIIRLYPTEQQEKLLLKAEKEVLKFLEISRFEFQKMLYHKICEEIGISKRSLSLLVQRFTGSMGEKAILPFDDNAKFVNDNGIWFLEVQLFAGKGNRIRIPLAKTEVPYYSVLDELDGLPIVITRENSDWFAYVSIPVSRASNGLIVGVDFNYRKWVASPYKGKPFFFDVGEYVEKIDRLQRMASRFQSRGEEEKVKECYHLIRETVKLAHGNFLSGIKERFGVCTIAMEDIEKMYKMIEEIDSKMTNNWLNTKTALRQFILRAMAKGFEVVEVDPKDTSKTCHKCGNPVKIYGKHKRLASCEFCGYRDY

SEQ ID NO: 61760 - protein, 316 aa, Unknown
  Microbial Source - Accession No. Ga0207433_10075916
YSLSLLAQRFTGSLGNKAIIPLNTAYNARFICENGIWFLEAQLLKGRGNRVKIPVAKTENKYYAAIGELDGLPLYVTREDDKWFAYVSIPVNAENNGRVIGVDFNVMEWVVAPADGGPVLFFDASWYSREIDRLQRLRAQLQSKGDLEGVQAACKSMLDIVKLAHGNFLARIQEKFGVCVIGMESVETLYKLTEKDNAMINNWLYSKTALRQFALRAMAKGFEVVEVDPKDTTRICHRCGAPVKINGRRGRSITCPSCGLTNYNRDLNAARNIARKAAEEWAKRVESRKQLEKLEPIAIVANGGGKDENKPEDEST

SEQ ID NO: 61761 - protein, 368 aa, Unknown
  Microbial Source - Accession No. Ga0207433_10082276
MNDLIKFAVTCGIDPRDHGTLKLMKEYKIYKKQFLSKVKNAVNQVVKDKNVYVYSIQKFLLEKKLLEFVKNLPFHPMPIGNQSYWLEKSTFKTPIGEYPCVNLHVKTKDGEAVCKLIVPKKYKDYVLEATGKSCPYFHDGKCEFERCPFGTPKMCKKINPHRGELELIEDLKNGFIRAHIVLRFPKPTPYEPEGWLGADVGWNKLAASIIYKKNPGFFAPSVHGKDLKTRIIQLRHKQKELMRSGKISEVWENRLQNVIKYAVGKTAKEIVSKAKKHRVGVAMEDLNFQSVTKGFLIPRYKLMVAVKTLCEREGVPFKLVPAKSTSITCPKCGCVDENNRNGERFKCLSCGYEADADIVGAMNIAKKA

SEQ ID NO: 61762 - protein, 837 aa, Unknown
  Microbial Source - Accession No. Ga0207747_1007959
SRAIRGWTEIVKKWMKLDPSAPQGNYLDVVKDYQRRHPRESGDFKLFELLSRPENQAAWREYPEFLPLYVKYRHAEQRMKTAKKQATFTLCDPIRHPLWVRYEERSGTNLNKYRLIMNEKEKVVQFDRLICLNADGQYEEQEDVTVPLASSQQFDEQIEFSSEDTGKGKHGFSYYHKGINYELKGTLGGARIQFDRDHLLRRQGVKAGNVGRIFLNVTLNIEPMQPFSRSGNLQTSVGRALTLKNFQVIAFKPKELTEHIKESEKNAPALGVESLQTGLRVMSVDLGQRQAAAISIFEVVSEKPDDNKLFYPVKDTDLFAVHRTSFNIKLPGEKRTERRMLEQQKRDQAIRDLSRKLKFLKNVLNMQKLEKTDEREKRVNRWIKDRGREEENPVYVQEFEMIRKVLYSPHSVWVDQLKSIHRKLEEQLGKEISKWRQSISQGRQGVYGISLKNIEDIEKTRRLLFRWSMRPENPGEVKQLQPGERFAIDQQNHLNHLKDDRIKKLANQIVMTALGYRYDGKRKKWVAIHPACQLVLFEDLSQYAFYDERSRLENRNLMRWSRREIPKQVAQIGGLYGLLVGEVGAQYSSRFHAKSGAPGIRCRMVKEHELYITEGGQKVRNQKFLDSLVENKIIEPDEAWRLEPGDLIRDQGGDKFATLDERGELVITHADINAAQNLQKRFWMRTHGLYRIRCESREMKDAVVLVPSDKEQKEKMETFFGNGYLQPLNQENDVYKWVKGEKIKGKKTSSPSDDKELVSEILQEASVMADELKGNRKTLFRDPSGYVFPKDRWYTGGRYFGTLEHLLKRKLAERRLSDGGSSKRGLSNGTDSDSNVE

SEQ ID NO: 61763 - protein, 1283 aa, Unknown
  Microbial Source - Accession No. Ga0207868_1000002
MNRFINKYSLSKTLRFELEPIGKTIENIQNKGLLIKDEQLAESYKKMKKTIDGFHKYFIELAMQNVRLTKLEAFADLYFASPERKKDEKFKEELKKVQDELRKEIAHGFKTGAAKEIFSKLDKKELITQLLENWINTQPEKPYFDESFKTFTTYFGGFFENRKNIYSDKEQSTAIAYRMIHENLPKFLDNIRVFGQIKNIPELYENANLLFQEIKNDLNINSIDEAFELKYFNEVLTQKQIDLYNLIIGGRVPEEGKSKIRGLNEYVNLYNQKQKDKSKKVPKFKMLYKQILSDREKTSFVPEKFQSSEEVTSAINSFYHCNVISFQPKDKPDAENILEKIQDLLAALKDYDLNKIYLRNDSQLTFISQKIFGNYAVLGDALNFYYDNVMHPGYEMEYKSANERKKKKLEEEKQAFIQQDYLSIGQLQDALDKYIPEIDDSVDWKRNYTTSCIADYFKNHFNAEKKEGEEKEFTLPANISAKYSCVKGLLENYPKDRELYQDKKAIDNIKLFLDALLELLHFIKPLILRADIALEKDAAFYGQLEPWYDSLKELIPLYNKVRNYATQKPYSIEKFKLNFENSTLLDGWDVNKEKDNSGVLFIKDGHYYLGIMDKKHNKIFRDIPKATSERTYRKINYKLLPGASKMLPKVFFSDKNTSYFSPDEEIQRIRNHGTHTKNGDPQEGYEKLDFNLNDCHKMIDFFKSSIQKHKDWKNFGFRFSPTYTYDSIDAFYREVEAQGYNITFTEIDESIIDRFVEEGKLYLFRIHNKDFSPFSKGRPNLHTLYWKAIFSPENLKNVIYKLNGQAEVFYRRKSIQPEQMVIHKSGEAIDNKNPLTGKKQSTFHYDLIKDKRYTVDKFQFHVPITLNFKASESNIINYEVLQYLRTQPDVHIIGLDRGERNLIYLSLINQKGELLYQEPLNALKSDKFNVVTNYQELLARREKERDMARKSWGTIENIKELKEGYLSGVVNKIATLMVKHNAILVMEDLNTGFKRGRFKIERQVYQKLEKMLIDKLNYLVFKDKSEDEPGGLFKALQLTNKFKSFKEIGKQNGFIFYVPAWNTSKIDPTTGFVNLFYIHYENMEKARAFFGKFQSISYNHDKGYFEFAFDYNDFTTKAEGCRTNWTVCTHGDRIRAFRNPEKNHQWDYKTIHITEEFMALFRKYGIEFSGNKDLREIITGQKDAAFYKSLLDLFRLTLQMRNTNQDWDYLISPVLNENGEFYDSRKADNHLPQDADANGAFHIAKKGLMWLKQIQQFEGDNWKKLDLDKTNKGWLRFAQGYQF

SEQ ID NO: 61764 - protein, 536 aa, Unknown
  Microbial Source - Accession No. Ga0208151_102415
MSSKTSSDKKNGKHSRQKESDNKRSLTVRLNLSMEQQIYLTSLIKAYTSIAKKLHEEARAKFMELTNGEIKNIKELKDVKKKFNSWFNEYFKTQRKWITDSLGSNISDQLFQFLMAQYKNFFANYENFFEHKVDGRPSFPSLPELFQIRDRGVEVDFDKKILIIKLKGKQLRLKFQSDRILYHGDPGAVTIKKVDGKFYAYIPFDFNPKFNEEKKGAIDIGLSNFFAAVTEDGDVILVKAKQYTYIYNMYKQRIKELDRMIGNIRKHTLKMYVTPPKSFRYHPLLGFTNNREVSKILISLYTSRYDEKRGKKKKLTREDMTNIVKKIRKVNYSLRIKRLNFMKVDGHIKLFPKKSRFMNDVYRDLPMLHKLEYERRKLFEKRDRTLTHIRRTAINALLRILKERGVTRIVVGYPRYINKNRNELTVNLFQYRKTINDLKIIGERYGIKVEELEEYGTSIRCSICGEEHKNGRIERGLYRCEKTGKTINADVNGALNIFYKAFSKMPKQLKKIETIKLTSSPPQRDEVSHLLSYRKL

SEQ ID NO: 61765 - protein, 1459 aa, Unknown
  Microbial Source - Accession No. Ga0208195_1004385
MPQQVKPPVTQRAYTLRLRGADSNDQSWRDALWQTHEAVNRGAKAFGDWLLTLRGGLDHTLADTKVKGGKGKPDRDPTDEERKARRILLALSWLSVESKLGAPEGFIIASGTEAAEDRNAKVVAALEEILKSRNVATNEIDEWKNDCSASLSAAIRYDAVWVNRSKAFDEAVKSIGSSLTREEAWDMLERFFGSRDAYLAPAKGSEDESSETEQEDKAKDLVQKAGQWLSSRFGTGKGADFRRMADVYNKIAEWAGNPQTSTTGNEAINNLAAALSEFNPASNDLQGVLGLISGPGYKSATRNLLTQIAAKATVTQQDLASLKDKATKDAQKCNQNTGSKGKRPYSDAILKNVEAVCGFTYLQDGDSARHSEFAVILDHAARRVSLAHTWIKRAEAERSRFEEDAKKVDQVPEAAKDWLNNFCLERSGLSGAQEPYRIRRRAVDGWKEVVTAWSKADCKTAKDRIAAARALQDDPEIDKFGDIQLFEALAENDAVCVWHKDGDAAKAPDPQPLIDYALAAEAEFKKRHFKVPAYRHPDALLHPIFCDFGKSRWDICFDVHKKVQTPFPRALCLTLWTGSGMVSVPLCWQSKRLARDLALGQDAQNDGSSEVTRADRLGRAASNVTKSDEVKISGLFEQADWNGRLQAPRQQLEAIAVVRDNLSLSDQERERRMSGLMDRIRWLVTFSAKLQPQGPWCEFAEKLQLRINPQYWPHADTNKDRKSHARLILSRLPGLRVLSVDLGHRYAAACAVWEAVNAEQIKVACQAAGHREPKESDLYLHLKRKVTKQKKGNQVESEKTTIYRRTGADTLPDGKLHPAPWARLDRQFHIKLQGEEERVREASNEEIWAVHQLEAELGRTVPIIDRLVKAGWGQAGKQKTRLEALRELGWTPAKEAQGSDETEEGEPRKPSLSVDELMSSAVRTMRLALNRHSDRARIAHYLITDEKTKPGGIKEKLDENGRIDLLQDALVMWHDLFSSRGWRDIAARQLWDDHITRLSGYKAPEEIGEDASGVERKTKQKENREKLHDVAKALAQDVTLRGALHDAWKKRWEEDDGRWKKQLRWFKDCVLPRGKHASDPTIRKVGGLSLPRLATLTEFRRKVQVGFFTRLHPDGTRAETGEKFGQSTLDALEHLREQRVKQLASRIVEAALGIGSEGGKGWDGAKRPRQRISEPRFAPCHAIIIEDLTHYRPEETRTRRENRQLMTWSSSKVKKYLAEACQLHGLHLREVSASYTSRQDSRTGAPGIRCQDVPVNEFMRSPFWRKQVKQAEAKQAENKGDARERFLCDLNAMWKDKTVADWEKAGIIRVPLRGGEVFISADPISPAAKGLQADLNAAANIGLRALTDPDWPGKWWYVPCDPASFKPTSDKVKGSTAINLDVPLKDVSAVSGDVTRKKSGKAKSQSKEVVNLWRDVSSREILTTGVAWEVYSAYQNQVQARVVDILRRSACPKNSREKQ

SEQ ID NO: 61766 - protein, 1546 aa, Unknown
  Microbial Source - Accession No. Ga0208357_1002034
MIAVDSGKEQPIVTTQRAYTLRLNGADKNDNSWRERLWNTHEAVNRGAKTFGDWLLTMRGGLSHTLADLGIHGKGNKPERKPTQQEINNRRIVLALSWLSVESEHGAPKDYYVPHDLDTNTGERTNWKTIEALREILKCRGVSNEEIENWLAACKDSITATIREDAVWVNRSNAFDNAMKVVGESLSREELWDLLEPFFASKQSYLELNTATDVQQEQSDENAEESKELSPDKAKDLSLKAGQWLSSRFGTGKGANFQKFAEVYDALALQCKSIKPATSGTEVCKCLASAVSQFAPHSQDLNGLLELISGPGYKSATQNTLKRINALQSVSGEDIQKLRGNCEADAAKSKQKTGSKGNRPYADVILREVEAACGITYLGTSDGPSRHWQYAVILDHAARRASMAHSWIKRAEEQRSKFEVERNKLNNVPVDAREWLDAFCAQRGSDSGAKDAYRIRRGAVDGWKQVVAAWVDSLGATENAGSELLSEAEALRIQAARELQDSVEKFGDIQLFEALARTEAKCVWTTNGKTDAQGLLDYVAGTDAIAKKRRFKVPAYRHPDALLHPIFCEFGNSRWSIEYAIHRAPAGLTKAQQLLEKKRTEIAKADLALAGATGTPKQTLIEEKLEKLRSAFKQQDAEVAWLGSHHAMTMGLWDGRHIQDTQLLWQSKRFGSDIGQPEVAAPLLVSRADRFGRAAVAIKEYSSAIPFGLFDLKDWNGRLQAPRRQLEAIAAIANRTNLTAEQKKQLVSKRISSIRWLVTFSAKLQSQGPWLEYATKHDLFEKRNGEIVSSPAQTRDAWRGIAFPFWHPGNPKGKGSAVRHVLSCLPGLRILSVDLGHRYAAACAVWETLNSEQIQEVCGNSGTEAPGPLALYLHLEKVSNGRTRKTIYRRIGADRLTDGSLHPASWARLDRQFLIKLQGEDRDARPATSEEIAAVDQIESALGFVRQAQRTGSDLLVDELMSDALRILRLGLRRHSDRARIAFNLTATKRPFSGGREEPLDKDGRIGLLQETLLTWHELNVADRWKDDVAEEMWHQHINPLLEDQVSIEVDNQDGSVTSARRRAQRELLIQKLKPIAIHLENNDSLCRQLQSLWNAQWQAEDRAWRARLRWIRRWLLPRGVKRDKDSHKSIRHVGGLSLTRIASFKVLYQIQKAFHMRPCSEDLKRNIPDRGDNRLEGFGQSVLDAMERMRENRVKQLASRIAEAALGIGSETDRRNKNGTQNKRAVEQSEDSRFAPCHAVVIENLTHYRPDETRTRRENRQLMDWSSSKVKKYLSEACQLYALHLREVPAAFTSRQDSRTGSPGRRCNDVKISEFASLSYWRKQVKAAEENQKKGNNGNARERYLLWIDKKISSGQSKQTDSFLIPSDGGELFVSAHKTGESQTFGKRKKLATLQADLNAAANIGLRALLDPDWKGAWWRILCDPTTFIPDKKKYAGSITIETSKALRVMAKVKLDVLMSADKAKQSAQNKGKRSNADGNRLMYLWRDPSSQPVHPDVLDGGEWQFYPEYKNGVEDRIIRKLLKSYDRTSRQDNQFVPGDEDIPF

SEQ ID NO: 61767 - protein, 505 aa, Unknown
  Microbial Source - Accession No. Ga0208429_100128
MSESKRALIVKLNPTRDECVCLISLIKAYTAIARKLNNDAYAKFMELTTNGLIENIKQLKDIKKKFYSWYNEYFKTQRKWITDTLGSNITDQLFQFLRGQYENFFANYENFFKHKIEGRPSFPTLPELFQIRDRGVEIDFDKKVLTIKLKGKRLSLRFQADRILYHGDPGSVTIKKIDGKFYAYIPFDFTPKFEEGKKGAIDIGLTNFFATVTEDGDAILIKAKEYTYVYNMYKEKIKELDRIIGKIRKHTLRMYITPPKSFKHYPFLGFTNNRQVSKIITSLYTSWYDAGRAKKKRLRREDMTSIVRKIRKVNYRLRITKLDFVKLNGHVKLFPKKSQFVKDVYKDLPILHKLEYEKKKLFEKRDKTLMHIRRTAINALLRFLREKGVTHVIVGYPYNINKNRNELTVNMFQYRKTINDLKTIGERYGMKVDEIVEYNTSITCSICGEVHKNGRIERGLYKCEKTGKMINADVNSALNIFYKAFSKMPKQLKKIETIKLTFSQP

SEQ ID NO: 61768 - protein, 499 aa, Unknown
  Microbial Source - Accession No. Ga0208429_100584
VGQQIYLTSLIKAYTTIAGKLNRDAYAKFMELTANGVVENIKQLKDIKKKFNLWFNEYFKTQRKWITDTLGSNVTDQLFQFLHGQYENFFANYENFFKHKVDGRPSFPSLPELFQIRDRGVEVDFDKKILIIKLKGKQLRLKFQSDRILYHGDPGAVTIKKMDGKFYAYIPFDFTPKFEEGKKGAIDIGLVNFFAAVTEDGDVILVKAKEYTYIYNMYKEKIKELDRIIGKIRKHTLQMYIIPPKSFRHYPFLGFTDNRQVSKIITSLYTSWYDVERAKKKRLRREDMTSIVRKIHKVNYRLRITKLNFVKLNGHVKIFPKKSPLVRDIYKDLPILHKLEYEKKKLFEKRDRTLRHIRRTAINALLRFLRERGVTHVVVGYPYNINKNRNELTVNLFQYRKTINDLKIIGERYGIKVDEIVEYNTSITCSVCGEVHKNGRIERGLYKCEKTGKMINADVNGALNIFYKAFSKMPKQLKKIETIKLTSSPSTRLFAPLTT

SEQ ID NO: 61769 - protein, 508 aa, Unknown
  Microbial Source - Accession No. Ga0208429_100770
MPSNTDSKRALTVRLNLSTGQQIYLTSLIKAYTTIAGKLNKDAYAKFMELTPNGVVENIKQLKDVKKKFYAWFYEYVKTQRKWITDSLGSYVSDQLLHFLDAQYKNFFSNYENFFKRKIDGRPSFPSLPELFQIRDHGVEVDFNKKELMIKLKGKRLSLRFQADKLLYHGEPGSVTIKRVDGKFYAYIPFDFTPKFEEGKKGAIDIGLANFFAAVTEDGDVILVKAKEYTYIYNMYKEKIKELDRIIGKIRKHTLRMYVTPPKSFKRYPFLGFTNNRQVSKIITSLYTSRYDVGRAKKKRLRREDMTSIVKKIRKVNYKLRITKLNFVKLNGHVKLFPKKSQFIRDIYKDLPILHKLEYERKKLFEKRDRTLRHIRRTAINTLLRILKERGTTHVVVGYPYNISKNRNELTVNLFQYRKTINDLKIIGERYGIKVDEIVEYNTSITCSVCGEVHKNGRIERGLYRCDKNGHVINADVNGALNIFYKAFFKMPKQLKKIETIKLTSSSP

SEQ ID NO: 61770 - protein, 989 aa, Unknown
  Microbial Source - Accession No. Ga0208461_1008711
MQQYDNFINHYAIQKTLRFELQPIGKTREHIQKNGIIEHDEALEQKYQIVKKIIDRFHRKHIDEALSLADFSKDTAMLKRFEELYWKKNKNENEKNEFVKIQSDLRKRVVSFLEGKVEGDARFAKVQQRYGILFDAKIFKDKEFISTACDDIEKDAIEAFKRFATYFTGFHENRKNMYSADEESTAIAYRVINENLPRFLENKARFEKIQHTVDSKTLNEIATELKPVLEKNKLETIFTLNYFQNTLSQAGITYYNTILGGKTKENGEKVQGLNEIINLFNQKNKDTMLPLLKPLYKQILSEEYSTSFTISAFEKDNDVLQAIGSFCNDCIFYAKNNVNGKAYNLLQTVQAFCNSIDTYNDNRLDGLHIERKNLATLSHQVYGEWNILRDALQIHYEAYEQKDNGNNNNYLESKTFSWKALKDALTTYKSLVEEAQDIDENGFIAYFKDMKFKEEIDGKTTSIDLIENIQTRYKSIETILQEDRNNKNNLHQEKEKVATIKGFLDSVKYLQWFLNLMYIASPVDDKDYDFYNELEMYHDTLLPLTTLYNKVRNYMTRKPYSVEKFKLTFEKSTLLDGWDKNKERANLGVILRKGNNYYLGIMNKKYNDIFDSIPGLTTTDYCEKMNYKLLPGPNKMLPKVFFSKKGVQFYKPSQEIIRLYNNKEFKKGDTFNKNSLHKLINFYKESIAKTEDWSVFQFKFKNTNDYADISQFYKDVERQGYKISFDKIDWEYILLLVDEGKLFLFKIYNKDFSPYSKGKPNLHTIYWKNIFSHDNLNNVVYKLNGEAEVFYRKKSIEYPEEILQKGHHVNELKDKFKYPIIKDKRYAEDKFLFHVPITMNFLSKGEPNINQRVQQYIASTSEDYHIIGIDRGERNLLYLSLIDATGKIIKQLSLNTIKNENFNTTIDYHAKLDEKEKKREEARKNWDVIENIKELKEGYLSQVVHQIAKLMVEYKAILVMEDLNTGFKRGRFKVEKQVYQKFEKMMIDK

SEQ ID NO: 61771 - protein, 1440 aa, Unknown
  Microbial Source - Accession No. Ga0208609_100002
MPQQDKPPVTRRAYTLRLRGTDPSNTSWRKALWQTHEGVNKGAKKFGDWLLTLRGGLDHTLADAKVKVGKGKPDRDRTDEERKARRILLALSWLSVESKIGAPVGHIIASGEEVAEDRNSKVVAALEEILKSRGLANSEIKEWKNDCSASLSAAIRDDAVWVNRSKAFDDAVKSTVGSSLTREEAWDMLERFFGSRDAYLAPVKISEDESSEVEQEEKAKDLVQKAGQWLSSRFGTGKGADFSHMAKVYERIAAWTDNAQVGTTGNEAINNLAVALSEFIPASEDLKGVLGLISGPGYKSATRNLLKGLDTKTAVTQQDLESLKDKATTDSLKCEQNTGSKGQRPYSDAILNGVEAACGFTYLQDGGSARHSEFAVMLDHAARRVSLAHTWVKRAEAERRRFEEDAKKIAKVPTPARNWLDSFCLERSLASGALEPYRIRRRALGGWKEVVAAWAKSSCSSCEDRISEARKLQDDPEIDKFGDIQLFEALAEDDALCVWHKDGYPAKATDPQPLIDYVLATEAEFKKRDFKVPSYRHPDALLHPVFCDFGNSRWDICFEIHKNRQSPNPNALSVTLWTGSEIKPVSLRWQSKRLARDLALDQEAQGNGASEVTRADRLGRAASNVTKNDEVNIAGLFEQKDWNGRLQAPRQQLEAIAAVRDNLSLSAEERNRRMSGMMDHIRWLVTFSAKLQPKGPWLDYATTNDLKLDQKNGEIVATPSNSKNEWRGLAYPFWHSDNQEGRKGLAKHCLSRLPGIRVLSVDLGHRHAAACAVWEAVSAEQVKKACQIAGHEAPKASNLYLHLKRKATKQKKDNQVVIEETTVYRRIGADTLPDGTQHPAPWARLDRQFLIKLQGEEEGVRKASDEEVREVYQLEAEVGRTAPMDADDGEVRKPSLPVDELMSSAGRTMRLALKRHGDRARIAHYLITNEKIKPGGIKEKLDEEGRVDLLLDTLVMWHNLFSFHGWQDDEARQLWDNHVAKLSGYKAPERIGEECSGKSRKNKQQENREKLRDAAKALAKDITLRKALHEAWKKRWEDDDERWKKQLRWFKDWILPRGKHASDPTIRKVGGLSLTRLATLTEFRRKVQVGFFTRLQPDGTKAEIKERFGQSALDALEHLREQRVKQLASRITEAALGIGRMRRPAGGKDPKRPGVSVDEPCHAVVIENLTHYRPEETRTRRENRQLMTWSSSKVKKHLSEACQLHGLHLREVSASYTSRQDSRTGAPGLRCQDVPVDKFMLSPFWRKQVEQADAKRAENKGDARERFLCELNTMWKDKTVADWKKAGAILVPAKGGEIFVSASQNSQKAKILQADLNAAANIGLRALTDPDWPGKWWHVPCDPVNFKPIPDKVKGSAAIDPDTPLKDTSVLSEGVTGKKSGKIKSQSKEVVNLWRDVSSKEVSTEGVAWEVYSAYQNQVQVRVVNILRRSACPKDNWEGQ

SEQ ID NO: 61772 - protein, 536 aa, Unknown
  Microbial Source - Accession No. Ga0208683_103187
MPAKTSSNKKNGKQSRQKDDNKRSLTVRLNLNADEQIYITSLIKAYTTIANKLNKDAFAKFKELSNNGEIKNIADLKDIKKEFYSWFNEYFKTQRKWITDSLGSNISDQLFQFLMAQYKNFFANYENFFKHKVDGRPSFPSLPELFQIRDRGIEVDFDKKILIIKLKGKQLRLKFQSDRILYQGDPGAVTIKKVDGKFYAYIPFDVNPEFHEGKKAAIDIGLVNFLASVTEDGDAILVKAKQYTYVYNTYKQRIKELDWMIGNVRKHTLKMYVYPPKSFRHYPLLGFTNDRRISKIIISLYTSRYDDARGKKKKLTREDMTSIVKKLRNVNYRLRVRRLNFMKVDGNIKLFPKKSRYMNDVFQDLPILHKLEYERRKLFEKRNRTLRHIRRTAINALLRVLKQKGVTHIVVGYPRYINKNRNELTVNMFQYRKTINDLKIIGQRYNMKVEELEEYRTSIMCSICGQEHESGRIERGLYKCQKTGKTINADVNGALNIFYKAFSKMPKQLKKTETIKLTYSPPKTNEVINPLYYRKL

SEQ ID NO: 61773 - protein, 383 aa, Unknown
  Microbial Source - Accession No. Ga0208683_103849
EVDFDKKILIIKLKGKQLRLKFQSDRILYHGDPGAVTIKKMDDKFYAYIPFDFTPKLEEGKKGAIDIGLINFFAAVTEDGDVILVKAKEYTYIYNMYKEKIKELDRIIGKIRKHTLRMYVTPPKSFKCYPFLGFTNNRQVSKIITSLYTSRYDVGRAKKKRLRREDMTSIVKKIRKVNQRLRIAKLNFVKLNGHVKLFPKKSPLVRDIYKDLPILHKLEYERKKLYEKRDRTLRHIRRTAINTLLRILKQRGTTHVVVGYPYNINKNRNELTVNLFQYRKTINDLKIIGERYGIKVDEIVEYNTSITCSLCGQVHKNGRIERGLYKCEKNGNVINADVNGALNIFYKAFSKMPKQLKKIETIKLTSSPPQRGEVFRPLNYRKL

SEQ ID NO: 61774 - protein, 517 aa, Unknown
  Microbial Source - Accession No. Ga0208683_104403
MLSNADSKRALTVRLNLSDKERVYLTSLINAYTSISRKLNKEAYTKFMELTANGVVENIKQLKDVKKKFYSWFYEYVKTQRKWITDSLGSYVSDQLLHFLDAQYKNFFANYENFFKRKMDGRPSFPSLPELFQIRDHGVEVDFNKKELMIKLKGKHLSLRFQADRLLYHGDPGGVTIKRVDGKFYAYIPFDFNPKFEEGKKGAVDIGLSNFFTAVTEDGDVILVKAKQYTYVYNMYKQRVKELDRMIGNVRKHTLKMYVTPPKSFRYHPLLGFTNERKISKILISLYTSRYDKKRGKKKKLRKEDMTNIVKKIHKVNYRLRIRRLNFMKMDGHIKLFPKKSKFVKDVFQDLPILHKLEYEKKKLFVKRDRTLRHIRRTAINTLLRDLKERGVMHIAVGYPHNINKNRNELTVNLFQYRKTINDFKIIGERYGMKVEEVEEYDTSITCSICGEVHKNGRIERGLYRCEKTGKMINADVNGAVNIFYRTFSLMPKRLKKIETMSYPALKAFRPLEPPQI

SEQ ID NO: 61775 - protein, 1280 aa, Unknown
  Microbial Source - Accession No. Ga0208940_1001448
MQQYDNFINHYAIQKTLRFELQPIGKTREHIQKNGIIEHDEALEQKYQIVKKIIDRFHRKHIDEALSLADFSKDTAMLKRFEELYWKKNKNENEKNEFVKIQSDLRKRVVSFLEGKVEGDARFAKVQQRYGILFDAKIFKDKEFISTACDDIEKDAIEAFKRFATYFTGFHENRKNMYSADEESTAIAYRVINENLPRFLENKARFEKIQHTVDSKTLNEIATELKPVLEKNKLETIFTLNYFQNTLSQAGITYYNTILGGKTKENGEKVQGLNEIINLFNQKNKDTMLPLLKPLYKQILSEEYSTSFTISAFEKDNDVLQAIGSFCNDCIFYAKNNVNGKAYNLLQTVQAFCNSIDTYNDNRLDGLHIERKNLATLSHQVYGEWNILRDALQIHYEAYEQKDNGNNNNYLESKTFSWKALKDALTTYKSLVEEAQDIDENGFIAYFKDMKFKEEIDGKTTSIDLIENIQTRYKSIETILQEDRNNKNNLHQEKEKVATIKGFLDSVKYLQWFLNLMYIASPVDDKDYDFYNELEMYHDTLLPLTTLYNKVRNYMTRKPYSVEKFKLTFEKSTLLDGWDKNKERANLGVILRKGNNYYLGIMNKKYNDIFDSIPGLTTTDYCEKMNYKLLPGPNKMLPKVFFSKKGVQFYKPSQEIIRLYNNKEFKKGDTFNKNSLHKLINFYKESIAKTEDWSVFQFKFKNTNDYADISQFYKDVERQGYKISFDKIDWEYILLLVDEGKLFLFKIYNKDFSPYSKGKPNLHTIYWKNIFSHDNLNNVVYKLNGEAEVFYRKKSIEYPEEILQKGHHVNELKDKFKYPIIKDKRYAEDKFLFHVPITMNFLSKGEPNINQRVQQYIASTSEDYHIIGIDRGERNLLYLSLIDATGKIIKQLSLNTIKNENFNTTIDYHAKLDEKEKKREEARKNWDVIENIKELKEGYLSQVVHQIAKLMVEYKAILVMEDLNTGFKRGRFKVEKQVYQKFEKMMIDKLNYLVLKDRQATQPGGSLKAYQLASSLESFKKLGKQCGMIFYVPAVYTSKIDPTTGFYNFLRVDVSTLNSAHSFFNRFNAIVYNNEQDYFEFHCTYKNFVSEPSLQKNVKSSKMHEYNNLKDTTWVLCSTHHERYKKFKNKSGYFEYKPVNVTQSLKQLFDEAGIDYQAGADLKEAIVTGKNTKLLKGLGEQLNILLAMRYNNGKHGNEEKDYIVSPVKNNYGKFFCTLDGDASLPVDADANGAYAIALKGLMLVERMKSNKDIKGRIDYFISNNEWFNYLIAKNTLNKSK

SEQ ID NO: 61776 - protein, 580 aa, Unknown
  Microbial Source - Accession No. Ga0209012_1000842
VPFGKKRSDKVAIVYEYGCLPPEGGLPAVAERQLVLADDFWNSLADIDRRHRAKMREILDDGELGKLNAHITSCKARIEELRGQIKGVNQRERRNAGVDANTKAEIARLKAEVKATAARIKEIKPEHIAKQKPLLEENDALRQAAVKRARQWFSDRGLYWGTYNAVLRSYETAHKVLLKSGEQMQAHRYTGEGRWVVQIITTAGEKPTTAEDLATGTMVQIDPVDFSDWKHISRGERRRRARTKCRIRVGSEGRAPVWLELPCVMHRPLPEGAEIVGADVTRRLVGPARWEYRLHLTLRVPAPVPADAAKPAIGVDIGWRALPNGGTRVAYAVGEDGSRKEVVCPDDILAGLAKSSDLRSLRDEKMNRIKAFLRDVIPGLDSADLSEQTEHLAMWKSPKRLIRLYRWWKEHRVEGDTEAFGRLHEWYYHDYWHLYQYEDDMRQQVLARRRDMYRIAAKEIAERASVVVIEEFDLRKFAQEDQPEDGEDNKIQRARRVAVAPSEFRIALRQACAARGVRVVEKPAQNTTRVHVVCGQVVAADYAADVTVRCPRCGVAYDQDANAALNLLGAGRGESTPAAS

SEQ ID NO: 61777 - protein, 1546 aa, Unknown
  Microbial Source - Accession No. Ga0209012_1001252
VANAKVKTTTRSYTLSLNAPSDTTDRSPLWHRIFRTHYAICCGAREFGKLLLDLRGGLPTSLAQLGEGIAENDRRQTQRGTRRILALGWLSVEDLDHARNDPHRVQDTAPGSPLDQDLAEKILRKILITKGIKSEEEQSNWISDCLPALTANIRPDAVWVNRAESFAQWQRGTQPGAQPPTPEEAQQILFSLCGESLVTLTLPEQPAAAGQKQPDQETSPDPEEQTDRPPAAPSADDEMDPSNASRGIFGDLFGENAEGKRSRSQGKDNFACAVRDFLCANPTPSADAITEFREKQKPREPNPPGPEKYPPEVSTSGAPTAVAKRYRKLLVCAGLWPKSADEDGSSRNSAKTKFADPKEPQKTEIQINALDLIDACNQAAPADDSGTSPKAGRVFAPAWASNIAEKVASATQMPANAKSLNEFKRLMFALAARRFSQTQSWTRRNEAERHMAAARQDAAVARLREIDPDHKAQDWLRGYEQRRADQSGSNGEFRITRRMIGEAEAVFKAWAGTNSAAERELKTVAVQTTAEKFGDAALYSEIARNTAAEAVWRSGSAPEILDQWVKLRKAQSDQQRTRVPRFCHPNAFRHPTWCEFGESSKPGVWYAWNPKSKPRKPEVGGEGDGTRRLWVLLPDFNSGIGQAVPLRWRSKRLSKDLGEALQPSDAPIPRADRVSIAAAGLNLEGANGVPARYRPSLPFSENTKGWNARLQANRTALLHLESKWDAEAATWRDGGRSLLALKWFTTFSPELAMSEGPGRAIHPKLGWNSEPHSDLNRAQKRGGNAKLILSRLPGLRVLSVDLGHRYAAACAVWETLTTEQMNAACQAKNHTQPAESDMYVHLAHPTERVVKSGRKKGQNLIQTTVYRRIAADTLPDGTPHPAPWGRLDRQFLIKLQGEQRPTRAASKNEADLANALFHRLGLRSDADSENKSRAVDKLMARTVRVATLGLKRHARRAKIAYALDPNTKAIPGMGGSSAAFTPGDEPHIHLLTDALFDWQSLATDAKWDDAHARSLWNHHIATLPGGFHLENPTPRDESAHEPSRQRQRSGDDALRATLKPIAEKLSKADRQEVHAAWKKYWGDSDGQSAIVPKVLQGQRGPEKTTPSASASGWHGKIRWITDWIMGKYLEGCTGHAWKHDVGGLSVSRITTMKSLYQLHKAFAMRATPEKPRGAPEKGESNLGAAQGILTAMESMRQQRVKQLASRIAEAALGAGIERRSDNGRELQRPRERVDDPRFAACHAVVVEDLTNYRPDEMQTRRENRQLMQWASSKVKKYLSEACQLHGLYLRGVPAGYTSRQDSRTGAPGVRCGDIPVEELMAAPRWRRQILTAEKTRRENNTGTARDRYILTLDEKYRLLTAEQRKKTPPARIPVKGGDLFVSADPDSPAASGIQADLNAAANIGLKALIDPDWPGRWWYIPCDATTHKPSPERTRGSAAVDCDVPLGPDSTGTPEDRDAKPKKNQRNSKIAGRGQSAIINLWRDPTHLPIKENPSAWCESKKYWNQVEHNVVKVIESKGQKLTQTAEAATGESASSPPIAPTDVPW

SEQ ID NO: 61778 - protein, 508 aa, Unknown
  Microbial Source - Accession No. Ga0209012_1015334
MSKNKHNKRTLTVRLNPTRDEQVYLISLIKAYTSIAGKLHTDAYAKFMELTTNGLIENIKQLKDIKKKFYSWYNEYFKTQREWITDTLGSNVTDQLFQFLRGQYENFFANYENFFKHKIEGRPSFPALPELFQIRDRGVEIDFDKKILTIKLKGKRLSLRFQADRLLYRGEPGAVTIKQLDGKLYAYIPFDFTPKFEEGKKGVIDIGLTNFFATVTEDGDVILVKAKEYVYVYNIYKEKIKELDRIIGKLRKYTLRIYITPPKSFKRYPFLGFTNNRQVSKIITSLYTSWYDVGRAKKKRLRREDMTSIVRKIRKVNYRLRITKLDFVKSNGHVKLFPKKSPFVRDVYKDLPIFHKLEYERNKLFEKRDRTLRHIRRTAINTLLRILRERGVTHVVVGYPYNINKNRNELTVNLFQYRKTINDLKIIGERYGIKVDEIVEYNTSITCSVCGEVHKNGRIERGLYKCEKTGKMINADVNGALNIFYKAFSKMPKQLKKIETIKLTSSPP

SEQ ID NO: 61779 - protein, 1484 aa, Unknown
  Microbial Source - Accession No. Ga020918_1000172
MPDEALVNGSTAGTDLMVVTQRAYTLRLQGVDPQDHSWRDALWKTHEAVNKGAWAFGDWLLTLRGGLDHSLADAKVKGGKGNPDRDPTDEERKARRILLALSWLSVESKKGAPEKYRLDKQSSARSNLNPEEALREILKGRGLGKSEIESWVQDCSASLSAPIRDDAVWVNRSKAFDDAVKSVGCSLTRDEAWDMLERFFGSRDAYLAPAKGSEDESSETEQEDKAKDLVQKAGQWLSSRFGTGKGADFSRMAKIYEEIANRAGKAQPGMTGDKAIADLATALSKFSPTSNDLQGVLGLISGPGYKSATRKLLKRFRDKTPVTQEDFQNLQDKAREDAQKCKNKTGSKGHRPYADAVLRDVESVCGFTYLQDGGSARHSEFAVMLDHAARRVSLAHTWIKRAEAERSRFQEDAKKVDQVPEAAKKWLNNFCLERSRAAGALEPYRIRRRAVDGWKEVVAAWSKPDCKTTEDRIAAARALQDDPEIDKFGDIQLFEALAEDDAVCIWHKDDDPANPPDPQPLLDYVAATDAEFKKRHFKVPMYRHPDELLHPVFCDFGNSRWNICFDVHKNTKTPFPRTLCLTLWTGSEGMKPVPLRWQSKRLARDLAFGQDTRKDGASDVTRADRLGRAASNVGKNDAVNIAGLFEEKHWNGRLQAPRRQLEAIARYVEKHGWNEKAKNIRDAIQWSVTFSAKLQPNGPWCAYAKEHGLRKDPQYWPHTEVNKDRKGHARLILSRLPGLRVLSVDLGHRYAAACAVWEAISTRQFQQNIEDKKILRGGTDAESLYCHTEHTTDGKKHTTIYRRIGADTLPDGKPHPAPWARLDRQFLIKLQGEAEGAREASNEEIWAVHKMETVLGRSVPLIDRLVAAGWGSTEKQKARLDAIKKLGWVPIKRADASEDADTEEEEELAFRPSLSVDDLMSSAVRTMRLALKRHGDRARIAFAMTAAYKPMPGDRRYYFTESKDLSATEDATARNSKHIEFIQDALLLWYGLISSRGWRDEAARQLWDDHVAKLHGYKAPEEIGEDVSGAEREKKQKENREKLYDVGKALAQNESLRKTLHHAWKTRWEEDDGRWKKQLRWFKDWILPRGKYASDPSIRKVGGLSLTRLATLTEFRRKVQVGFFTRLKPYGTRAETKEQFGQSTLDALEHLREQRVKQLASRIVEAALGIGSENKQHWEGGKRPRARSKDPRFAPCYAVVIEDLTHYRPEETRTRRENRQLMSWSSSKVKKYLAEACQLHGLHLREVSAGYTSRQDSRTGAPGIRCHDVPVKEFMRSPFWRKQVAQAEKKQDEGKGDARERFLCVLNAKWKGQPEADWEKAGAVRVPLKGGEIFVSADQNSPAAKGLHADLNAAANIGLRVLTDPDWPGKWWYVPCDPVSFLPVKDKVEGSAVVKPDQPLPKSAQAQSGDGAKDKKKPGKRGASKSKESKKVVNLWCDISSSPLECREEWKEYAAYQNEVQSRVIHILEKQIKRLRQATARGVQ

SEQ ID NO: 61780 - protein, 1226 aa, Unknown
  Microbial Source - Accession No. Ga0209101_1000507
MKNFFQLFTNQYELSKTLRFELRPIENTAELLKKNKIFEKDKKVYEYYQKTKKYFDKLHCEFIDEALVNTSLPNKDYSIYDKLFFEYKKDKENKKIYKALNEHAKKLRTNIVKDFEKTAEKWRDEYILSIKDEKSQKKLKQLEGLDLLFKTEVFDFLKKKYPEAQIEGNSIFDSFNKFFTYFDNFHQSRKNFYKDDGTASAIPTRIIDDNLPKFLENKKIFEEEYKVLNLSREEKDLFRLDFYNKCFTQTGIENYNEIVSKINSKVNKYRQKNKKSKIHFMKELFKQILSKRSKQATEQDTSISIENDSQVFEVLQDFIMETKNCNRMAKNILETFIQHQEEFDLQKVFLKGSNVTRISDMWFTSWFAFGDLLPKNSTGKKLANFISFQDIKNALEKTEIQDVFKKKYAKYNKESFYDQFLQIFDYEFHKALNDCEKNIVEAEKMMKVDKVYSNKKGILRNGKNGEKQKEIIKDFADSALSIYQMMKYFALEKGKKPVTDMDEDPRFYNDYKDWCEKSRTLLYYNEFRNYLTKKPYAEDKIKLNFEKSTLLMGWSANEEGNLQYYSSILRKDNKYYLGLMSSASTFNINKKEAFETRDGFYELMNYRQLKSTTIYGSLYKGEYKKEYRKDKETLTNQELIERTKKILEKQKFSYPQLEVILDKKYKAAEDLAKDLGNIVLYNIGFVKISKRYVNNLTNENFYLFEISNKDFLNKKKKGNVNLHTKYFQLLFDKKNLESKKGAILKLSGGGEVFYRKATKNLPKKKDKKGKEIIDRKRYAEDKILFHLPIVLNIGFKDKQINSKVNQVLATQRKARIIGIDRGEKHLLYISVIDENANILKIKSLNTIDVPNKKEPDDYHKLLDEKEKERDDERKSWHTIENIKELKHGYISQVVNEIDKIIFECLDERILPIIVFEDLNIGFKRGRFKIEKQVYQKFELALAKKLNYLVSKEKGNYLNAFQFTPPVNNFQDIHKKQVGIIFYIPASFTSAICPVCGFRKRLYGFTFKNINQVKKLLAEHEFNIFYDGKRFNFECLASKENEKKENKNGLYTEIFLNKKLFFNSDIERLFNKKSKDNKKWETISFIATEELKKLFEGKIDLKRNIMDQILAGDFRAEFYQQLIFIINRILNLRNCHAVEHRDFIACPSCGFHSEKNYEKLKSRYAGKEKFEFNGDANGAYNIARKGILLIKKIRQFAKSNNIEKLMPYDHLQIDMQEWDKFCAKNKS

SEQ ID NO: 61781 - protein, 1202 aa, Unknown
  Microbial Source - Accession No. Ga0209101_1006392
YKSATRNLLGQFNNKTAITQDDLKRLAETALADKVKCETNSRPKGERAYANSILHDVESACGFTYRVDKGEQPVPVSDYSHYANDYRWGPANHSEFAVMLDHAARRVSLAHTWIKRAEAERRQFEENAKKIDKVPKVAREWLDSLCAERSIVLGALEPYRIRRRAVDGWKHVVAAWSKSDCKTAQDRITAARLLQEDPEIDKFGDIQLFEALAEDHAVCVWQRDGEAGKTSDPQLLIDYALAAEAEFKKRHFKVPAYRHPEAFWHPVFCDFGQSRWKICFDVHKNRQSRRQRACANRISRKICFDVHKKRQTLRLSLEVWTGSKMLDMPLCWQCKRLARDLALGQDHKKDRSCQVTRADRLGRAVSNVARNQEVQILGLFEQEYWNGRLQAPRPQLEALGRYIEKHGWDAKAQKSCRAIRWMISFSPRLQPAGPWGKFAEKLQLNPNPKYWPHAEDNKDRGSRSKLILCRLPGLRVLSVDLGHRYAAACAVWEAVDAEQVKEACQAAGHREPNENDLYLHLKKRTTKQKKGSQGVVEETTIYRRIGADTLPDCTPHPAPWARLDRQFLIRLQGEEDEARAASNEEVWAVHKLEAELGRTIPLIDRLLGAGWGQTEKQKARLKALRELGWTPANKCQAFNSTDETELRRPSLAVDELMLDAVGTLRLALKRHGDRARIARYLITDERTKPGGVKEKLDENGRIELLQDALIIWHGLFSSPRWRDDAAKQLWNEHIAKLVGEQNLVEVSEDASGSERRTKQKQNREKLREAAKALVDDVALRQALHDMWKRRWEEEDREWRRRLRWFKDWVLPRREQARKAYSRPAETGSSSHPKRRARYAAIRRVGGLSLTRLATLTEFRRKVQVGFFTRLKPDGTKAEAKEGFGQSTLDALEHLRAQRVKQLASRIVEAALGVGRIRRFPGVKNPKRPDTPVDKPCHAIVIENLTHYRPEETRTRRENRQLMTWSSSKIKKYLAEACQLYGLHLREVTAAYTSRQDSRTGAPGLRCQDVPVKEFMRSLFWRKEVAQAEKKLTAGKGSSYERLLCELNQRWKDNSPGDGKRAELLRLPHKGGEIFVSAAPDSPAARGLQADLNAAANIGLRALTDPDWPGKWWHVPCNAVTFRPVEDKVKGSAAVKLDQSLRQVAHPQSKDPGAKKSKEIVNLWCDISSLPLEHREWKLDWEPYPAYWNNVQCRVIRVLQGKV

SEQ ID NO: 61782 - protein, 1268 aa, Unknown
  Microbial Source - Accession No. Ga0209102_1000334
MTKRKSRLAGYRLHKERILFAGGQIIRTIKYPLTPSYPTEEMTQFLKDFEEAVIADDLKIRGDLNINDYLTYTAKGKPLYTLFDFWVDSLRNGVIWMSKGTMLIDFLATQYNINSPFDNVWKKASPRITSFFKKDEFKEIILCDPVRSSSTKNSFHKRITGYLKDHLKVKNGDSYTIVSNDAQKVVEFIVHSFFNNEGKLILEGEEQFKFWKKEYNLDKAIIESAKPKGKYADITFVIIPELISNLNPKQSLEDLINKRDVWLQGRRFDKEDKSLLSILGLSDNFNGFSNFLGVVLRDLQKENGNKEVLYDAQKTVFPLLGNSKDEVLEALDFLSQKAKLLGVTSLPLVNGWHEYRSIFGGKLKSWFTNSQKRKEELDGQISRFKESLFKARNYLQTENFGEEANKEKEDILSFLSLLENFFTDEKRSIKVEENYQLFEPLLALVKRRLNFFYQRYIQKEGDETKVNELGHFKGLYEKIYKPVAFYGYAAKKVNKKFVNQTFPILEDGIENIEKLISYLQNSFSVQETFEEVKQGKEEIDDPYRKLLQFFWNKYLEDSINSHLFAEKYKDILKGNIEDNEWEKVIDKTKKGKYVFYKSPYAKGSLEEIPIGTSNYLEQLQISILELSKFILSYKKDILLSDVGLLLDWVELSKNVISILLRFNTKKTYRIDDLRLDNFSQAKRYQELFKHGDYPKNEFSFIIQSLVLSEIRGAATLYSKREYIASYSVQVVGSDSKYRIYYIPKEKISITPDVVKSRPESSERKQLMGPHYYAVALGKVLEKKKSEIFNSIALFKKNIKAIFLPESSLRGVFRLSSSPYQLQFLDKFIYRPFGWENIDVSLSEWSFIVEKRYTINWDLRSKKPKLLPVTDTERIKKNKVYIAIPFNLIPSKEVRQAAPLKTIAKGKETREKDLSRLNFPIMGVDVGEYGLAYCLVKIIFDKNTYKILAIELVSDKKEAFGFIEDRNIGNIKDKFAEIQHRARQGSFDEEDTVITRVRENAVGHLRNRLHVIVTLQRSSSVYEDSISNFETGSGRTTKIYNSVKRADTESDTNADKMTHNHVWGEKTKWVGRNVSAYASSYTCVSCLKSLYQVRKEDLSKMRITQRGGRIVTISGPHGDIKGYVSKEEKYNLGYHFRETDDELKNFRKIVQDFARPPVGDHSEVLKKYAKQILEKGKIEEWRKRRGNSSIFICPFCQYITDADVQAAFMMAIRGYLRFSGIVPSRGNKKDQDQEQEDEKTAGESFLEQTQRQLGDVNLSKILEAFSLKI

SEQ ID NO: 61783 - protein, 343 aa, Unknown
  Microbial Source - Accession No. Ga0209102_10036881
YKPSDGRFWIHFKTKEGEAVCYLHVPAKYHSLIEQACGEDNPVLGQVELIEDCKYGWVNCHICLRLPKPEPYEPKGWLGVDTGFRKLATSILATPCIALRSTGHTSSELKGVAESPSFGAHGSIAFTHEHKAQGNSGLKPASINGDCLKLSFSHPTFHGKEFKTWIIQLRHLLKQYARKGKAWKKWDFRLKHTIKYAVGVVAKEIVSKAKRLKAGVAMENLTFKATTKGYIVPRYKLMIAIKTLCEREGVPFKLVPSQYTSITCPKCGYADDGNRSNERFECLKCGYKADADIVGAMNIALKAFDRTADGAVNGMGLDPIPKGEGALRLQAAGCCNPPKADER

SEQ ID NO: 61784 - protein, 652 aa, Unknown
  Microbial Source - Accession No. Ga0209143_1000788
MLKLELKGDPNSLKFLDNLFNEYKRLVRIADSFVYYLYPYYANINEQEKLERLNKLIMSMERKAIIKRRKDKKLEDKISKELRYTYSHSDHLKTLLHIYIKYAKQYYGIDIKHAHLDMQGGLADIMHSNAENAYKHRTIPNLRRRLINVMPIRVSKRPLAENRRNKDNNKYYQRDAEFIFKNGKIMLRIGSKRNGLTFKITKRFNDDDRLSMFIKAIQGNDGLTIGDPCYLVRKDADNGYRYYIMVSISKNVNVKALYEASKNKSKIRIVGVDSNISKYIATMFCVEVDKENKEFKLVNAKGIDSKDYINAVKKYEEERRKLQQGRMKGKINKKKGSRYKEKEDYTIKNRCGDSERIDLRRQLIGYICNQILEFADKNDADIIVIEDLEGLNKELKTLKIIKKELGKLYNDVNSKGNNAIDDKINEINKKYNNKIRRPLLELLNKIKEYSKNKDRIKVAKYILKYKQGIERRISLLSIMAYYQFKQELEVDALWNGKLLYIIDPKYTSQQCLRCGHTNKLNRITQRQFKCIKCNFGMNADFNASANIALRFATKILKLELELKQGESSSMMTITNATTPLYASINAGSKLGVVIANNNTDGSVASTMSSVASILQGCYEGRSPCSRGQTEQSCSAKRLVTLDEFIEQRGNGG

SEQ ID NO: 61785 - protein, 667 aa, Unknown
  Source - Accession No. Ga0209143_1002248
MLTITRARTKKITKTMLKLELKGDPNSDSMKFLGNLFNEYEQLVRIADTFIYHLYPYYANINEQEKLERLKELVKSLDEKAIRKNKRRKREPQEAEEEQTPTETEAKHTYTHSNLLKTLLHRFIKYTKQYYGIDAKYAWLEKQGGLADLMHSNAESAYKHRSIPNMRRRLTNVMPITMSKSPLDENRKDKKNNGRYYKKDAEFIFENGKIMFRIGRGKHKVTFKIATRFNDAERLGMLIHAIQGDNGLTIGDPCYLVRKETYNGYRYYIMVSISKNVDVKALYEASKNKSKIRIVGIDSNISKYTATMFCIEVDKENKEFKLINAKGIDSNDYINAVKKYEEERRKLQQGRMKGKISKKKGSRYKEKEDYTIRNRCGDSKRIDIRRQLIGYICNQILKFANENDADIIVIEDLKGLNKELKHLRIIKKELGRLYNNVNSKGNNAIDDKINEINKKYKNKTRRPLLELLNKIKEYSKNKDRIKVAKYILKQRQIIERRISLLSMMAYYQFKQELEVEALWNGKLLYTINPQYTSQQCLRCGHTNKLNRITQRQFKCIKCNFEMNADFNASANIALRFATKILKLELELKQGESSSMMTATNATTPLHASINAGSKLGVVADTSSGVASILQGCCEGRSLFMRGQTKQSCSAKRLATLDKFIEKRGNGG

SEQ ID NO: 61786 - protein, 493 aa, Unknown
  Source - Accession No. Ga0209143_1006289
IFENGKIMFRIGRGKHKVTFKIATRFNDAERLGMLIHAIQGDSIFTIGDPCYLVRKETYNGYRYYIMVSISKNIGKKALYEASKNKNKIRIVGVDFNISKYTATMFCVEIDKENKTYKLINAKGIKSKNYINAVKKYEEERRKLQQGRMKGKKQKKKGSRYKEKEDYTIKNRCGDSKRIDLRRQLIGYICNQILEFANENDADIIVIEDLKGLNKELKHLRIIKKELGKLYNNVNDKGNNAIDDKINEVNKDKKYKNKIGKPLLEILNKIKEYSNAKDKVKVARYILKQRQIIERRMSLLSIMAYYQFKQELEVEALWNGKLLYTINPRNTSQQCLRCNHINKLNRITQRMFKCIKCNFEMNADFNASANIALRFATKILKLNLKQEQGESSSMMTVTITNATTPLHASINAGSKANEQGYCYCNDNGNLVRNGSVAPTMSSVASILQGCYERRSLFMRGQTKQSCSARRSIATLDEFLEQKGNVFAMKGNGG

SEQ ID NO: 61787 - protein, 964 aa, Unknown
  Source - Accession No. Ga0209162_1014546
MDKKITGYRLHFKRILFSGGEIVRTIKFPLSSTSLSSGKNDLINNFESQLINDDLKIRGDVNLNDYLIYEFSSKPIYTLFNFWIDSLKSGIVWADKPASLIDFINEFYLIKSPYDLVWERATEEFKKYFDKKSFKEILISGPIRKTKNPSKKESFKKRIISCLKDEYVIKEGNSLSVESPEVLKFINKIVNSFFDEDGNLILEGKKQDNFWLNEFGIDKSIIQKTKPEGELKDITFVIIPELIVDSFNKEYEVDSLIEKRRVWLKKRFNKEKEIEKNLQLILGLSNNFNGFSNFLGKGLRAFQGGKILMVFGAMSKINPSVKNQENKEKVLESLNFLSDKSKFFTPRPALNIVKSWADYRTFFGGKLQSWYSNGIRRKNELKVQVKEIYEFLTKTADYLAAKISFNDENERYAIKEFELINLKINRLKQFIENENFDISSEDGYLIFDTLLSSLRTQLNLYYQKYLSSEEDNIRDNKDLKGIYQKIYKPIAFFGKATKRKNKKVIEETVPIIESGINNLFSLMKKLEKTFLPKNTFSKVKNKNEDEETILRNLVDYYQNKVSHKMLNSLTFVNKLEEVMKSVVEENDWDRLHSNKYVFYKSEYQKGALELIPLKKGSWIDIFEKIILEMTSYLLTFDLTGLLKDKKILLDWIEIAKNTLAKLIRFNTCDVFTLDELNLDLRNFPKAMDYIKIFKITKVDKNELNFIVQSFILSELKGAATLFSKEKYLAKYNVQVIDADKKFKLFYKPNDGFIEREVNRKNLLKPHQYFVALDKIEDKKIKEKANFLLLTKEDIKPVFIKEENFSKLYKISSSFYQIQFLDKFIYMPEEFKDLGIRLSEWNFVLEREYKIDWDLYTKRPKMTFIENSKKNKLYLSIPFNVFYKSKKKDVSLSKVISNRLSYPILGIDVGEYGLAYLLAEFSDKKIKILKKGFIEDRNIANIKDKFAEIQLKARTGIFNEEDTTI

SEQ ID NO: 61788 - protein, 1553 aa, Unknown
  Source - Accession No. Ga0209171_10000726
VPKRVRTQTRSYTLRLAAPTGVAEWLPLWDRLFRTHYAVCRGAAEFGELYLNLRGGLSPDLADLRDPTVAEGRWEYVRRGRRRMLALGWLSVEDKRSATTHKFRLPQVQPGQTLSDDEASSLLREVLTTKAVRDDTLQKEWIRDCIGALTARIRPDAVWVNRAAAFRKWQEEHPSCANEMAEQARIILFNMCGSDFVNLALPEDKAIDGNVDLEDSEEAEPNDEVEKGELVGEQQNPSNASRGVYSDLFGGDSVKKVARSKGKQTISAKLATFLRSRDRCCPIRDQIIQWRQENGLPPFDTVSSNPYPPEVTSSGAPTAVAKRYRKLLVSLGMWPQSNDEDGKPRQQAETRYVKSVAGELPDTKKVQVNALDLLAACDEIKESEKDNDRVFNPAWAVSIARRLSEVSGLNSTDKSATEFKRLMFAIVARRMSQTQSWIKRNEVERHKATVRRDAVLDRLRLLDLTQKAQNWLRNYEQVRGETSGAIAGYRITRRAIAECDEVIASWKDTTTGEDRDKQTAEMQARSEKFGDANLYYDLARDTLAEAVWHAPDGSPSSEILKEWVKFRQAEYDQGRLKIPRFCQPDPFHNPTWCEFGGTSKPKVWYAWNPRTRPSKPEQSGETDGSHRLWLLLPDWGKNQTLPTAFRWSSKRLWRDLGGDTIYVEEIPRADRLGVAVAGLPATARDGEMRHYRPAYPFSEDAKGWNARLQVARDALSEMERAWDEDRKQWLDGGLALKRLRWFVTFAPSLAVAEGPWGKLRAKLKWKKFPPAEVNERQKRQGSAKLILSRLPGLRILSVDLGQRFAAACAVWEALSTEEFRNECNAARAKPGFDVTVTDLYTTIAGPGERSKGASRKAQAEGRDSFRPTTLYRRIGEDFLRDNKTGKLTDGAHPAPWARLERQFLIKLQGEELPARAASQDIEMEMVERFARRVGFENADLKLPRRIDELMARTVQIARLGLERHGRRARIAHALDPQTHSVFGIGGKEIPFQQGDETHVKLLTEILFDWHALASEGKWNDVKARELWNVHVSALSVGSRIENPTSGAAADDDRTRLEKRKDDDVLRERLKPLAKVLAETDRAAMHTAWKNRWEDDDGLERDESDYEHDKKGGITKAKRQTSGWHADLRLFTDWIMGWHLPGVTSKLWTRNVGGLSLTRIGTMRSLYQVQKAFAMRARPQNPRGAPEKGESNTGVAESIRVAMERMREQRTKQIASRIVAAGLGMGGHWKHAEVWQRTPDGTREAKKKYVWVEEQSPKYKPCHAVVIEALRNYRPDELQTRRENRALMNWSANKVRKFLEEACQLHDLHLREVVPNYTSRQCSRTGLPGVRCDDVRVEEFLTAPWWRKRVKSAYNRKAKPAREHPYDAEHQMLVALDERWPECQKVPEALRTDYERKVKSANPIRLPRKGGNLFVTAIPWSCAANGHRPCSRCRSFRALQADLNAAANIGLRALLDPDFPAKWWYVPCGANDGKPAKDKVSGAVCFGLMPKFVEVSEAKRDYVNAWRDPSSRPFPDCDNKWSETSKYWNGVRSRVITTLRVFNGLVPDTSTIDA

SEQ ID NO: 61789 - protein, 1181 aa, Unknown
  Source - Accession No. Ga0209172_10015399
ADKATVTQADLTKLNETAAADKGKCETNTGSKGRRPYSDAILKDVESVCGLTYRVDENGNAVSVSNYSLYGDDYNWGSARHSEFAVILDHAARRVSLAHTWIKRAEAERSKFEEDAKKVDQVSKAAKDWLDKFCLERSGMSGALEPYRIRRRAVDGWKEVVAAWSKSSCSTSADRIATARALQDDPEIDKFGDIQLFEALAEDDAVCVWHKDGDAAKAPDPQPLIDYALAAEAEFKKRHFKVPAYRHPDALLHPIFCDFGKSRWDICFDVHKKVQTPFPRALCLTLWTGSGMNTVPLCWQSKRLARDLALGQDAQNDGSSEVTRADRLGRAASSVAKSDEVKISGLFEQADWNGRLQAPRQQLEAIAVVRDNLSLSDQERERRMSGLMDRIQWLVTFSAKLQPQGPWCKYAQDQKLGLNIDPQYWPHAGENKNRKGQARLILSRLPGLRVLSVDLGHRYAAACAVWEAVSTETFRKEINGKNILRGGSGKDDLYCHTKHDAESKKHTTIYRRIGADTLPDGEPHPAPWARLDRQFLIKLQGEEEGAREASNEEIWAVHQMEIALGRSVPLIDRLVAAGWGCTERQKSRLEELKKLGWKPLPAAEPTGDESGEDEGADVYKPSLAVDELMSSAVRTMRLALKRHGDRARIAHYLIADKKTKPGGIKEKLDENGRIELLQDALVLWRDLFSSRGWRDDAAKQLWDDDITRLSGYKAPEKIGEDVSGVERKKKQKENREKLRDVAKALAQDVTIRGKLHDAWKKRWEEDDGRWKKQLRWFNDWIFSRGKAADNSTIRKVGGLSLTRLATLTEFRRKVQVGFFTRLHPDGARAETKEQFGQSALDAIENLREQRVKQLASRIAEAALGVGRMKRPRGGKDPKRPDIRVDEPCHAVVIEDLTHYRPEETRTRRENRQLMTWSSSKVKKYLAEACQLHGLHLREVSASYTSRQDSRTGAPGTRCQDVPVKEFMRAPFWRKQVAQAEKKQAESKGDSRERFLCGLNAMWKDKAVADWEKAGAVRVPLKGGEVFVSADRISPSAKGLQADLNAAANIGLRALTDPDWPGKWWYVPCEPASFRPVKDKVDGSAVVNPDQPLRQSAQAQSGDAAKDKKKRGNKGAGKSKEVVNLWRDISSSPLECIEFGEWKEYAAYQNEVQCQVIRILEEQIKDRDRQPHEGSKEDDIPF

SEQ ID NO: 61790 - protein, 1304 aa, Unknown
  Source - Accession No. Ga0209201_1007464
MMRSSRWAAHSRARRHGICWNASSEAVMLIWPQRKSPKMNLQRKSKRRKRRTSSRRPDNGSAAGSTGKGADFSRMAAVYGKIAAWADNAQAGTTGNQAINKLAADLSEFTPASNDLQGVLGLISGPGYKSATRNLLNGLATKTTVTQQDFGSLRDKAADDAQKCKQNTGSKGQRPYSDAILKDVEAVCGFTYLQQDGGAARHSEFAVILDHAARRVSLAHTWIKRAEAERRRFEEDTQRLANVPGPVKAWLDSFCSERSATSGALEPYRIRRRAVDGWKEVVTAWSKSSCSTSADRIAAARALQDDPEIDKFGDIQLFEALAEDDAVCVWHKDGDAAKAPDPQSLIDYALAAEAEFKKRHFKVPAYRHPDALLHPIFCDFGKSRWDICFDVHKNVQTPFPRALCLTLWTGSGMVSVPLCWQSKRLARDLAIGSNATNAGYVEVARADRLGRAASNVTKSDEVKISGLFEQADWNGRLQAPRQQLEAIAVVRDNLSLSAQERERRMSSMKDRIRWLVTFSAKLQPQGPWCEFAKTNQLRIDPQYWPHADSNKTRKGQARLILSRLPGLRVLSVDLGHRYAAACAVWEAVNAEQVKKACQVAGHEAPKASDLYLHLKRKATKRKKGNQVVVEETTIYRRIGADTLPDGTQHPAPWARLDRQFLIKLQGEEEGVREASNEEVLKVYHLEAELGRTAPIIDRLVKAGWGQSGKQRTRLEALRELGWKPASEAVVSDGMGADEGEVRKPSLSVDELMSSAVRTMRLALKRHGDRARIAHYLITDEKTRPGGVKEKLNENGRIDLLQDALLMWHDLFSSRGWRDDVARQLWDNHVAKLSGYKAPEEIGEESSGPERKKRQKENREKLHDVAKALAQDVTLREALHDAWKKRWKDDDERWKKQLRWFKDWVLPRGKHASDPAIRKVGGLSLPRLATLTEFRRKVQVGFFTRLQPDGTRAETKEQFGQSALDALEHLREQRVKQLASRIAEAALGIGRMRRPMGGKDPKRPNGRVDEPCHAIVIEDLTHYRPEETRTRRENRQLMTWSSSKVKKYLAEACQLHGLHLREVSASYTSRQDSRTGAPGIRCQDVPVKEFMRLPFWRKQIAQTEKKQAEGKGDARERFLCDLNAKWKGKSEADWEKAGVIRVPVRGGEIFVSASRDSQGAKSLQADLNAAANIGLRALTDPDWPGKWWYVPCDPASFRPIKDKVEGSAAVKPDQALRQSAQAQSGDAAKDKKKRGNKSAGKSKEVINLWRNISSSPLECIEFGEWKEYAAYQNEVQCRVIRILEEQIKGRDKQLHEGAKEDDISF

SEQ ID NO: 61791 - protein, 577 aa, Unknown
  Source - Accession No. Ga0209207_1001084
MIKAFKYGMLEPVAGFDKAAIDVLYLRNKLWNSLVELEKAHRERYRTLITGSDDELSKIQARLDQIEAERAELVKRKRQARAMVRSKKVDTSEHDDRIDMLMAERNDLRTKAKDIRLQVKEKVKPAIADLEKERYEAVKHLIHEAGLWWCNSETVIAAYDLARVKAMKENAELRFRSFDGSGKFAVRKTGGFALSDLVSGKLSFARLEALPDANFAHLSERGKRSRARHHLTMTILTYKDESGKLCRHEVTWPIILHRPLPPEGMIKFIHVQRKRIGKDFQWTCSITMEVDEIQKTPIDHPSRAACGIDIGYRLVKDGLRVAVIADTSGKIDHLTLPQDWIEKMDHVESIQGHLDNSNDLAWGELKALLKSMHDYPESIAESIGRLLKAGDRTPVRGMRALHWRLRNEPETMPEVLSILDTWEAETCRREREMHRLRRKLINRRKDLYRNFAYKVANRYVLIRIRGLSLKKLAAVNLEDGSDNQMPQAVRNNRTRASLSELTLCLQQAAVKAGADFEKVFDVNSTTTCSTCGNQNLKMDREDIYFRCEKCDTLHDQDENAAKNLLRKEFYLAEQAVM

SEQ ID NO: 61792 - protein, 403 aa, Unknown
  Source - Accession No. Ga0209207_1006579
MKLVQRHLIKPNNQFYQEIDKLTFLSKNLYNCGIYLCRQAFFKGEKIPSQNQLYHQLKGGIDYRLLPSKVSQLVLKQVEKTFKSYQSAVKEYKQNPSKFTGKPKLPRYKDKVKGRNIVTYNYQAISVKYLKKGLVNPSKTSILIKTDIKEILEVRLIPKRGVYLVEIVYEKPEKETIISDNSAYIDLGLNNLAVLTSNKKGFQPKLICGRALKSCNHYYNKRIAQLKSQLNDQQKTSKRIQSLTLKRNNKVDYYLHTASRYIINNLLENNISLLIIGQNKNWKQGIKLGKKNNQNFVNIPHDKLIQQLTYKAQLVGIKVITTEESYTSKCSFLDLEPVKKQEKYLGKRVKRGLFEASNGYLYSADVNGSLNIGRKVVGESVFDRDSIVRFVVNPLRVKSYKAS

SEQ ID NO: 61793 - protein, 526 aa, Unknown
  Source - Accession No. Ga0209224_1000001
MSSKTTSDKKNGKRLGQKESDNKRSLTVRLNLSTEQQIYLTSLIKAYTTIARKLNNDAYAKFVELTTNGVVENIKQLKDVKKKFNLWFNEYFKTQRKWITDTLGSNVTDQLFQFLRGQYENFFANYENFFKHKIEGRPSFPTLPELFQIRDRGVEIDFDKKILTIKLKGKRLSLRFQADRLLYHGEPGAVTIKQLDGKFYAYIPFDFTPNLEKGKKAAIDIGLINFFAAVTEDGDVILVKAKEYTYVYNMYKEKIKELDRIIGKIRKHTLQMYITPPKSFKRYPFLGFTNNRQVSKIITSLYTSRYDVGRAKKKRLRREDMTSIVKKIHKVNYKLRIAKLNFMKLNGTVKLFPKKSPLVRDIYKDLPILHKLEYERKKLYEKRDRTLRHIRRTYINTLLCILKERGVTYVVVGYPYNINKNRNELTVNLFQYRKTINDLKIIGERYGIKVDEIMEYNTSITCSICGEVHKNGRIERGLYKCEKTGKMINADVNGALNIFYKAFSKMPKQLKKTETIKAKLHLLNVN

SEQ ID NO: 61794 - protein, 398 aa, Unknown
  Source - Accession No. Ga0209225_1002268
LDSETIKLCVKGVIPPRDPDLRKLMHEYSVYKRVLIPRVKQAVRQVIKDKSIAVYAQQKWMVDKKLSEYLKNLPFHPMPFHNQSVWLEEKDGRFWIHFKTKQGEAVCYLHVPIKYHSLIEKACGEDNPVLGQVELIEDKKYGWVNCHITLRLPKPEPYQPKGWLGVDVGWNKLATSIACTCNSHLRFFNPTFHGKEYKTRIIQLRRLLKDYARKGKAWKKWDYRLKHMVKYAVGSVAKEIVSKAKKLKFGIAMEKLTFKSTTKGYLVPRYKLMVAVETLCEREGIPFKLVPAQYTSMTCPKCSYKDDKNRVGERFRCLKCGYQADADIVGAMNISLKALTDAQMEGVMPQASGLRLKGLGLKPKPLGHVARPLRGMSDDLCKATRKPSKIESEVKKEG

SEQ ID NO: 61795 - protein, 633 aa, Unknown
  Source - Accession No. Ga0209399_10016114
ESPLHEPSRWKRRVLEHCSVLVSNATAALLAFIRERLVVTPDVEDATKIASADLAFEVGKEHASRIAALLAQVKHDRETGERLPFSNAYRFTACEPVPGTDRFRVVARLADGTWRERKLKRGGVRRTHGINCIHATTGFQQLLATYAAPKLLHVVPPALRAGVCQEVAQQVLSYLGQLESSKVRGDVAFPTVEDRDPVRRRQAYEDAIDALVADLTPFSYAKLRDKFPGEYAADDPRGDRLIVDDPRWFAVTTTPDPHPIPLLFSQGSAVRLLEGSTSFDAGVSKRNRHRGSSTASESVRQSRPDAVQRKGTTGLRQWYAAIPLLDADDDALRAIAAAAHERSGRQLDLALHPLPLDGGVRWRRRERDVLVPLSGDRKRLERILRNPNLHIAWSRLVQKRTGWVLQLTVRIPMQPAVEHRRVLGVSFGIDAVATWSLVDEDGVELEHGALAPNEQILTFLREKRQLEWDQEKGRWIGKQRFAMQLESIAHGVANTLLAIAEEHHAVLAVEDVSWVKKAGPNHAQNVLFTAWNFGQLRRILSYKSPMVGRGDPVTVSDYVVSYTCPTCGACRKPKQKPDHADTWRDGDTLSCRSCGFQGVLSPSDRARRVTANGLTIWQDRWQRSDERNGTETS

SEQ ID NO: 61796 - protein, 372 aa, Unknown
  Source - Accession No. Ga0209410_1010848
LELIKVTVPAVIPPRDYGLRVLMKEYKAYKKALISRVKRAVIDVIKDKSIRVYAQQKYMVERKLTTYLKNLPYHPMPIHNQSYWIEKENGSYRVHIKTKHGEASCLLIVPKKYRFLIERAIGKSCPYKANNNMCVFKECPFNTPKMCDSINPHLGQMELIEDTKYGWVNCHIVLRLPKPKSYEPKGWVGVDVGWNKLATSILATANPHLRFSNPSIHGKALKTRIIQLKYLMKQYARKGKSWKKWNFRLKHTIKYTVGVVAKEIVSKAKKYKAGVVMEDLTFKSHTKKWLIPRYKLMVAIKTLCEREGVPFKLVPSKYTSIRCPKCGHIDKRNRRDKRFRCVRCDYKADADIAAAMNIAAIGMGLAPIPKSS

SEQ ID NO: 61797 - protein, 1241 aa, Unknown
  Source - Accession No. Ga0209467_1000554
MQNKETFEKFTGLYELSKTLRFELKPIGGTKDLLSKNYIFEKDILVRENYLRAKKYFDCLHCEFINEALEKMSFEENDYQEYENLYLAYKQEKNQKNFKAWNDYVKKLRTKIKDNFTTIAIVWRDEYSKIVSDEKLQKKIKKISGIDLFFKKEIFGLLIKKYGEEEGAKIINLETGETETIFDCFSKRFSTYFINFHHSRQNFYKDEGIAGAIPTRIIDDNLTKFLDNRKIFQDKYGVLDLSEEEKIIFSLTYFNQCLTQVGIEKYNNQVARLKSKINEYRQKTKEKLPFLKELFKQILTEKNKQGTEQDEFIIKNDEQVFEILNNFLKEVKENNLKAELIFNKFIEKQNEYLLDKVFIKGNNINTISNKWFLNWSIFGSLLPKNRGNHNKVADFVSINQIKQAFDNPELPKDQKLLFKKEYFELKVVFENKNAFENFISIWQYEWNKSLDICNSSIIDVKKMIEEDKKYTNKKGVLKNCKKGELQKELIKDFSESALSVSQMMRYFELKKGKNSVNDLDEDANFYNEFNEWAEDDKVWLYFNEFRNYLTKKPYKEDKIKLNFEKGTLLMGWSANEDGNLQYYSSIFRQGGQYYLGIMSSASTFNLNKEEAFNIEDGFYELMEYNQLKSTTIYGSLYKGEYKTDYKTDKKILSDQELISRVKVILQKQEKHYPQLKEILKQNYETANDFAKVLGDLVLYNISFTKKVSKKYVDDLTQKNFYFFQIVNKDLISKGEKGKSNLHTRYFELLFDEQNLYNNQGLALKLSGGGEIFYRPKSLDDKKEIQTKKNKILLNKGDKAIEKKRYSEDKILFHLPIVFNAGLKNKQINFKVNQFIISQTKQRIIGIDRGEKHLLYVSVIDENGKVLETKSFNKIEVPNKKEPDDYHQLLDKKEKDRADARESWQEIENIKELKQGYISQVVNEINKLIFSYLEEEVLPIIIFEDLNIGFKRGRFKIEKQVYQKFELALAKKLNYLVSKVKENYLEALQLTPPIQNFQDIKKQTGIIFYVPASFTSAICSVCGFRKRLYGFLFKNIEQAKKLLTDHQFKIVYDGGNFNFECLASQENKKKTKNKNELFLEKELADKLIFSSDVERLINVRSKNNKGWETIKFDAKVELEKLFEDKIDLQGDIMEQILAEKLEANFYKQLMFIINTLLKLRNSHNVEDRDFIACPSCGFHSDKGFQGKEFNGDANGAYNIARKGVLISEKIRQFAKEGDLEKLKIIEDLQIEMREWDKFVQNN

SEQ ID NO: 61798 - protein, 1510 aa, Unknown
  Source - Accession No. Ga0209507_1000982
MAMQTIVTQRAYTLRLKGSDPQDQSWREALWQTHEAVNKGAKAFGDWLLTLRGGLCHTLERLPDITDSEIDSEHERAKHDAKENNKSEPTREDIAKKLHVKREQENQPDAIRDRRILLALSWLSVESERGAPAEYIVAHDLDKQSGKRSNWKTVEALKEILKKRGVDDEKEIQEWEKDCRESLAAHIRDDAVWVNRSQAFEEAARSTGISLTHDAIWDMLERFLGSAGTYLEPADISDDEASGSKNEESKDLVQKAGGWLCDRFGTGKGADFGRMAKAYDAIADWASEARTEASGTEIVAALASALKEFNPKSNDLPGLLRLISGPGHKSATRNLLRQIDGQSLVTRQNLDKLKEMAIDDAEKCRKREGSKGRRPYSDTILKDVESACKFTYLTDNGAARHSEFAVMLDHAARRVSLAHTWIKRAEAARRKFEEDARRMDSVPSETRTWLDEFCVERSGASGAQDQYRIRPRALGGKTRKAWKAIVQAWAKPDCQAEEDRVEAARLIQAEWDDDEKFGDIQLFEALADDDALCVWQKDGDSAKSPDPQHLIDYVLAADAIQKRHFKVPAYRHPDALLHPVFCDFGTSRWDIGFAIHEASDGVCKAKKNVERKKNAVQKAERSVKKASGNRQKEAKAQDELKKRQADLAEAETRMAWLSNMHALSMTLWTGSMVKSEPSLLWQSKRLTHDLAFDQGKPDGKVLEVTRADRLGRAAGNVPVNVSVAIAGLFEQNDWNGRLQAPRSQLDAIAARVAKHGWDAKAKQMRNHLRWLITFSAKLQPSGPWVKYAAGVPEDAVAKPFVSRKGDYAVRHQGNDTREGHAKIVLSRLPGLRVLSVDLGHRYAAACAVWETLSPEQLKAACQAVGHEPPRDGDLYLHLKNGEQTVVYRRVGADAIEAVDEGTGKVKTISHPAPWARLDRQFLIKLQGEDREVRRAIPAEVAAVQELEKTVGRESPDRRYLRVDDLMSETVRSVRLALQRHGRRARIAFNLTASKKLLPGGREECLTDEGRAALLADTLADWYALLTGKGWTDEWAKQQWETHVVPFLQSAALPQIPEDAETTPKARRKYRADLTEKLNPTAVSLAKNESLCRKLHCLWATRWREDDAALRKRLRWLRDWILPRGRAEDNRAIRHVGGLSLTRIATIKSLYQVQKAFRMQPEPDDLRKNIPSKGDDTLRDFGRSILDVMEHMREQRVKQLASRIAEAALGIGRMKRPKGGKDPKRPRARVDEPCHAVVIENLTNYRPEETRTRRENRQLMTWSSAKVKKYLAETCQLNGLHLREISANYTSRQDSRTGAPGIRCQDVTIKEFMQSPFWRKRVAQAEKKQAEGKGDAHERFLCDMNAKWKDKPEADWERAVAVRVPLKGGEIFVSANAESPVAKGLQADLNAAANIGLKALLDPDWPGRWWYVPCDPTTFKPAKDKVAGSTAICLDKPLKSVSAVQDMDGPEKKRGKAGEKSREIVNLWRDVSSHPIDSDEGWRESRDYWGDVEKRVLDILRESVEKDSIPF

SEQ ID NO: 61799 - protein, 1489 aa, Unknown
  Source - Accession No. Ga0209513_1002134
MADGKPPTFPRTYTMRLCPPDEGQADRNGLWDKLFATHYAVNAGARAFGEFLLDMRGGLSPDLSRMGLDRIKDDAKRRLALAGRRRMLALGWLSVEDDHGAGDHPHALPESSGQPLPRDVAEKLLRQILETKGVTDRATVDEWCDDCLGALTAAVRDDTVWVNRAESYRNLDSGPSPDQAFKILERLLGKNFLDLSLGKETRTRDRHRGQLGTDEGEDGEDKEEWRTTAASGNDPSENARQLICDLFGTGQKGDFRKTAGFAAKVKNWVNSLGDYKNCDQPSLENRIRETFRSVFSGGEYPSFPSKELKKSRPKPTSLYPQECVSGKKPGKLARRVRKLLVYLKVWDQMPGVEDGTIRDNRLHALVNEIDSACDEEIKKDRTDLKAPSWAPALLSRLEKASGIKLASRQQGSPSAGEFRILFAVLAARRLSQTQSWTRLNEMTRHEAQSDLDSAKSEIDRLDPKGKARGLLERWEDRRRQESGTRGEYRITRAAISALDDVLEAWATSTGPEERIGLLPEVQSRAEKFGDASFFEWLARTDNECLWKHASTGAISGEIITNWVKKREAEAAISLVKVPRYCHPDPFLHPVWCEFGNSKPDVRYFLRNELGQTNKRRKNSQHSEDLRNVELLLVNDRSGTVGMERLRWASDRLWKDLGVAATQSSDALARNDRLSRAALGLSTGSYRPIYPFTGQAKKWNARLQVDRNALEELRGLWDNRTRKWTDEGRRAHQVRWFLSFSPDLKASAGPWHRFVENNRDILNDLSTRPYKDKKTDELRVPLPWGKLNRKENRKGRAQLVLCRLPGLRVLSVDLGHRHAAACAVWETLSTAQINQLCYQHHQPPPGPSSLYHVYETSIPDTDGCTGEVRKLKRLKPKQFIYRRIGPDRVNGREHPAPWARLVRQFVIPLQGEKDEPRWPTEEEKRLAHTLRLTLELPESKVERPVRFDELMSGIIDMLERGIDRHKKASRVAYNLTAREIVEPGGKLVPVDGTDRYEVISSALKDWYSLASSPGLYSNFAREIWNAKCAGLKGGRPVPAETAADEPEKVSFSDLAKGLAESEHLTRELHDLWAGKWHENQPKWRPLLKEIRRRLVPSSGFARNNKRLLRHVGGLRLDRITLFQRFHRLQLSYRDCPPPEESGIKKGAENSTHEHFGQRLLDDIDRMRENRVKQLASRIVEAALGIGREPADSKRRREQTPGRGDHAPCHAIVIENLAYYRPSEEQTRRENRQLMSWSSARIRKYLQEACLLNGVLWYEIWSAYSSRQDSRTGAFGLRCRDIPVASFVDPQGFLRDHLRRVKLANSPEATMLRELEARWNAATRVWKVSPDEAWQLSDDGRRWAWAGPKPQMVGDRRKVPDPVRIPWRGGEIFVSSNERSPAAKGVNADMNAAANLGLRVLLDPDWPGAWWYWPARLTGKGRVPVDETCKGSACFPAGYEIETGESKEETVNLWRDITCASIESGGWQEYAGYSAQRRNAVINILRKHNGL

SEQ ID NO: 61800 - protein, 449 aa, Unknown
  Microbial source - Accession No. Ga0209542_10001012
MAKGKKKEGKPLYRAVRFEIFPTSDQITLFLRVSKNLQQVWNEAWQERQSCYEQFFGSIYERIGQAKKRAQEAGFSEVWENEAKKGLNKKLRQQEISMQLVSEKESLLQELSIAFQEHGVTLYDQINGLTARRIIGEFALIPRNWQEETLDSLDGSFKSFLALRKNGDPDAKPPRQRVSENSFYKIPGRSGFKVSNGQIYLSFGKIGQTLTSVIPEFQLKRLETAIKLKKFELCRDERDMAKPGRFWISVAYEIPKPEKVPVVSKQITYLAIGASRLGVVSPKGEFCLNLPRSDYHWKPQINALQERLEGVVKGSRKWKKRMAACTRMFAKLGHQQKQHGQYEVVKKLLRHGVHFVVTELKVRSKPGALADASKSDRKGSPTGPNWSAQNTGNIARLIQKLTDKASEHGGTVIKRNPPLLSLEERQLPDAQRKIFIAKKLREEFLADQK

SEQ ID NO: 61801 - protein, 447 aa, Unknown
  Microbial source - Accession No. Ga0209542_10007289
MAKGRKKEDKPLYRAVRFEVFPAPEEVALLFRVSENLRYVWNTALRDRQKSFEDFLKPIYEKIGQEKKRAQEAGFFDLWKDEICKDFNRLLRERDIPVNFISNKKSLLLELREVFKQHTITLYDQINELTQKRKDGEFGSVPRNWQEETLDSLDGSFKSFLALRKNGDVDAKPPRARADENGFYKIPGRYGFKVYEGKFQLSFGKLGQTLTFPIPEFQQERLAAAVKLKKFELYRDERNMAKAGRFWISIAYEIPKPVSLPLGNNVVFLSIGASRLGVVSSFGEFCFNLPRPDYHWKPEINVLDERIAKTVKGSRKWKKRIAARARMFAKLGHQQKQHGQYEVIQRLLQYGVHFVVTELQVRSKQGALADASDPTRGNSPFGANWSAQNTGNIGRFLQKLTDKAVENGGTVIKRKAPALSLQERSLTDDQRKILIARKLRDEFLAEK

SEQ ID NO: 61802 - protein, 722 aa, Unknown
  Microbial source - Accession No. Ga0209669_100016
MIGRVKLSTILILKLKYQNKQLYTRLRLSLISTQATARATTKVKAKKLTKTMLKLELKCEPNSLKFLDNLFNEYEQLVRIADSFIQHLYPYYANINEQEKLERLKELIKSLDEKAIRKNKRRKRELYEEEEQATTAKTKTETKHQYTHSNLLKTLLHRFIKYAKQYYGIDAKYAYLEMQGGLTDLMHSNAESAYKHRTIPNLRGLSNVMPIRVSKRPLLENRRSKDNNIDEYYQRTAEFIFNNGKIMFRIGSKRNGLTFKIAERFNDVERLGMLIDAIQGKNGLTIGDPSYLIRKDTDNGYRYYIMVSISKNVDVKVLREAVNNKNKIRIIGIDSNISKYIATMFCIEVDKENKEFKLVNAKGIDSKNYINAVKKYEEERRKLQQGRMKGKINKKKGSRYKEEEDYTVKNRCGDSKRIDIRRQLIGYICNQILEFANKNNADIILIEDLKGLNKELKTLRIIRNELGKLYNNVNDKGNNAIDDKINEVNKDKKYKNKIGKPLLEILNKIKECSNNNKNNTKVAKYILKQKQMIERRIFLLSIMAYYQFKQELEVEALWNGKLLYIINPKYTSQQCLRCNHTNKLNRITQRQFKCIRCKFEMNADFNASANIALRFATKLKLELELKQGESSSMMTITSATTPLHASINAGSKASEQGYRYNNANLVRNGSVAATMSSVASIALQGEGERRFPCLRGQTDEPCSAKRSIATLDEFLEKKGNGG

SEQ ID NO: 61803 - protein, 679 aa, Unknown
  Microbial source - Accession No. Ga0209669_101200
LSSKTKIKKITKTILKLELKCDPNSLKFLDNLFNEYEQLVRIADSFIQHLYPYYANINEQEKLERLKELVKSLDEKAIRKNKRRKREPYEEEEQTITAKTKTETKHQYTHSNLLKTLLHRFIKYAKKYYGIDTKYAWLEKQGGLADLMHSNAESAYKHRSIPNMRRRLTNVIPIRVSKIPLAENRRNKDKCNDDKPYERDTAFIFENGKIMFRIGRGKHKVTFKIATRFNDAERLGMLIHAIQGDSIFTIGDPCYLVRKDTDNGHRYYIMVSISKNVDKKALHERIENKSKIRIIGIDSNISKYIATMFCIEVDKENKTYKLVNAKGIDSKNYINAVKKYEEERRKLQQGRMKGKISKKKGSRYKEKEDYTIRNRCGDSKREDLRRQLIGYICNQILEFANENEADIIVIEDLKGLNKELKHLRIIKKELGKLYNDVNSKGNNAIDDKINEVNKNKKYKNKIRRPLLEILNKIKEYSNNKDRIKVAKYILKYKQRIEKRISLLSIMAYYQFKQELDVEALWNGKLLYTINPKYTSQQCLRCSHTSKFNRITQRQFKCIKCNFEMNADFNASANIALRFATKLKLELELKQGESSSMMTVTVTNATTPLHASINAGSKVGVVANNNTDGSVAPTMSSVASILQGCYEGRSLFMRGQTKQSCSARSIATLDEFLEKRGNGG

SEQ ID NO: 61804 - protein, 1184 aa, Unknown
  Microbial source - Accession No. Ga0209750-1000252
MFNKKKGYRLHLERIIYSGGEITRSIKYLLASHSDSQKNKELLNNFSQDLYNDDLKIRGCLNLNDLVNNNQIYNLADFWIDSLRAGVIWQSSASSLIDFIKRLNHQETIGEKIFNNANERIKRFFNSEKFIKEIILSEPKRISSKKQAFYNSLFDILKDEFKKQEKNEKIIIDNKAEQLIKEIVDAFYSNDGVFLMEGEEKQNKFWQENFNIDKNMIKKEKEDILKDVGDITAFIHPPLIILKGDVSQLIDERKKYFSEKDLEEILGLSDNFNAFSHYFNKFFLLLYQDKQEKIFECYQKIFSFSQEDRKRIKDALDFLLEKSKLLGLPKIVNSWSDYRSVFGGKIKSWFSNYLNREDKAKKQEKKIKEGLEKVNKFLLDFIQKNQVDSDLQQEIKFYYDKLNQFINSYQNQEFFHQQELFLLFSDLLAEYREKLNRFYQKYLSDKEKEEKKVDEFPLFKDLFEKYEGPISFYGKTKLEDNKKIIDLTFKTIKVGLNLIRRLLIDLYNSSDFKNSDNNNQERDLRRIFEFLLNKIPATKTFREKYLSILKDNFDQQTYKEMTLKPSRYTFVENIYSRENRKLIELPSKNFEELLSKIIKDLTDFSLSFKNDDLFVDIYLLSDLVELAKTLISLVINYSNKSQFDSYKNELIDDTYQKAKKYLETFKISFFNSKKEANYFYQTRVLSELKGAVALFSKKYYQAKYNIQILKSNEIFPLFVKFSDLLKKEEINDINKLKLIFKKPYRYLIALKKIKFKKKQQQSSVIHLDKKNKDLVLISPQDEDFLFKLTSSFYQLQFLDRFVYPVKKWLNVDITLSEWSFILEKKYKINWDFNNGKPEFSEIDSRLYLNIPFKIKAINQQKILKPKELFLGIDVGEYGVGYALVNFKDEEIKIIKSGFIRSKNIASIRDKYRLLQDRSKKGVYFSSTNVVQEVRENAIGEIRNQIHDILIKNNADLIYEYNISNFETGSGRITKIYDSIKKSDVYAENEADKSVIQHVWGIKKSIASHLSAYGSSYTCSNCGRSIFSFSENDIFSSKVIKRDGNIITIQTPKGEVFAYSKDKKFNIGYSFSQEKNKEEMKNLFMKIVKAYVRPPLLKSEVLLTQKKLDREFLEKFKKERGNSAIFVCPFFDCQSLADSDIQAAFIMALRGYLKKKKGKDINYLEESLNYLQNFKGKINFSNLLH

SEQ ID NO: 61805 - protein, 660 aa, Unknown
  Microbial source - Accession No. Ga0209827_10659006
VNGTETRDPTAVAEIKRENRVRVYRYGAREPLDVELVREQLRLAHQYRNVLVAIELTRRAEIDAALARLAPDLASVEREIGEPEREADPESGTPATEATGLLGEIAAAESAVRARRVKERGRPKDVGPLKSLRARLKSARARRKDLRAALFASPAWESERTRIEDANLLRCKAARAACGVYWGTYLAVETAARSFRRGPPPRFCAWRRRKDRLAVQIQGGLSISDLLSGEDTQARLVAEGRGARCCDGCRARVRRERRGQPEPTDARPCSCASLPPPSARRTDHATLWLRVGSTESSGPVWARVPIAYHRPMPPDARIKWIFLLRRSVGVDDVWSVSFVLERESWGDPERSSTGAVGIDVGWRRLEDGALRVAVWSGSDGREGEVALPAWWLREQRRVESIHGERDRIFDVARGALSAWLAGREGLTELLLEARKTLHAWRAQARLASLALRWRASRMEGDTETLSALESWRARDKHLLTFESHLRAQLQGSRRDLYRRVAADLSRRYATVVLEDMDLRTWHRLGPVEDGGSVEEDAARRYVRDACLSELCGAIEDRVREVRRVDPAGTTATCHACCRTQDVESLVHVCAGCGLRWDQDVNAARNLLAASGSVVSWGQESLAPVVRAGYSEDRNQRRRETEAGWAAARRAGREAAQNKGS

SEQ ID NO: 61806 - protein, 378 aa, Unknown
  Microbial source - Accession No. Ga0209980_10011112
VYIHSVEIRKTYRYRLYRSKRDKHLVRQIELAADIWNHFVALTRRYYSLYGSYPGYYRLKRHLAKLKKRNKGHWYGLGSQAAQNVIERLDRSYQRLFAGKGGRPGFKKRRKYPSFTLTQAGWKYLGGNRLRIMGHTYKFALSRPIDGQIKTLTIKRDRCGDLWVCFSVVQEAEPTIAQTGDAVGMDFGLRDLLTLSTGEQIESPQHLKQSLRELARLQRSLSRKQRGSNNWREACRDVAKLHRKIANQRRDFHFKTARRLLERYDIVAIEDLNLDGMKRLWGRKVSDLGFHQFVGILSHLAAMNGKQAVKIDRYFASSKTCSGCGWVKQDLTLADREWACAACSCVHDRDRNAALNIRDRALSHVVGDVRPARQAVAV

SEQ ID NO: 61807 - protein, 384 aa, Unknown
  Microbial source - Accession No. Ga2100049_1040060
MDTIKICVKGVISSRDKALQVLQKELKNYKKVLIPKVQKAVRKIAKDRSIKVYAQQKWMLDKKITGYVKNLPFHPMTFHNQSVWLERTEKGHFLIHFKTRQEEKEAVCHLQVPKKYRNQIEKACGKDNPVLGQVELIEDNKYGWINVHTTLRLPKPKPYEPKGWIGVDVGWSKLATSILVTANPHLHFTNPTVHGKDFKTRIIQLKYLLKQYARKGKSWKKWSFRLKQTVKYAVGTVAKEIVAKAKKHKAGVAMENLTFQSQTKRWLIPRYKLMIAVKTLCERKGIPFKLVSPRNTSITCPKCGYINAENRNGERFNCRKCGYQADSDIAAAMNIAAIGMGFTPMSKGVRLNAEASGHVARPLSTDETDDLYKGRCKPNIIEER

SEQ ID NO: 61808 - protein, 362 aa, Unknown
  Microbial source - Accession No. Ga210051_1028938
METIKFCVKSVISPKDKALQILQKEFKNYKKVLIPRVQKAVRAVVKDRNVKVYSQQKWMLDKKITEYVKNLPFHPIAFHNQSVWLERTEKGYFYIHFKTKQEEKEAVCYLRVPTKYHNQIEKACGKDNPVLGQVELIEDNKYGWINVHIILRLPKPEPYKPKGWVGVDIGWNKLATSILATANPHLHFTNPTVHGKDFKTRIIQLKYLLKDYARKGNAWKKWDFRLKQTVKYMVGTVAKEIVTKAEKHKAGVAMEDLTFQSQTKRWLIPRYKLMVAVKTLCERKGIRFKLVSPRNTSITCPKCGYINAENRNGERFTCRECGYQADADISAAMNIATIAMGFTPVAKEVRLYAEASGDVATP

SEQ ID NO: 61809 - protein, 641 aa, Unknown
  Microbial source - Accession No. Ga210057_1032582
NIDFYAPSSEILKIRKHSSHTKNGSPQKSFEKSEFKVSDCHKMISFFKKSLQKHPEWNCFGFRFSPTKTYGAIDEFYRELKNQSYSISYIPFDKNLLMEYIDQGKLYLFQIWNKDFSKHSKGKPNLHTIYWKALFDPKNLKNVMYQLNGEAEMFYRKKSIKNPKIHKANEPIKNKNPNNPKKESVFGYDLVKDRRYTVDKFQFHVPITLNFKATGTGRINDTVLRFIKNNPEVNIIGLDRGERHLIYLTLIDQKGNILKQQSLNIATRKIPASKKFNIETNYHELLDNKEKERDKSRKDWRVVENIKELKEGYISQIVYDISKMMVKHNAIVVMEDLNFGFKRGRFKVEKQIYQKLEKKLIDKLNYLVFKDKAENEIGGLYCALQLTNKFESFKKLGKQSGFLFYVPAWHTSKIDPTSGFVNLFNTRYESADKAKRFFNNFENIRYNKDRDYFEFEVKEYSKFNPKADGTRQEWVICTNGDRIKTSRNPSKNNQWNNEKIVLSDEFKNLFKKYKIEYEKDLKNSILSQTEKTFFEKLLNLFKYTVQMRNSVTGSEVDYIISPVMNAKGEFYDSRKAGGDLPKDADANGAYQIAKKGAWVLNQIKAHEGKDWKKLNLAISNKEWLQFAQAGEGSIYGKIQNN

SEQ ID NO: 61810 - protein, 606 aa, Unknown
  Microbial source - Accession No. Ga214474_1011027
MASKSIEAKVICRGNDQYTAEQKKQFLWLTHQTFNEGVRKVLPYVFKMKRGELGEEFQAIYYAISTSQDAIGKLEAIVNPEWKTKKIGKSQPDQWRQLLQYREIEREFREKIKSEGGKSTKKFRRELKKAKARLAKEVGQKDIWAAAAAILRQRQNLLFNRDKVLPNLPSEFRRKIYEMTIQLMHGNQELIANWEDEHAEWLMAREKWEEENPEYIKVRPILERFEKEQGKVKGSRIRWLAYLDYLSSHSQLAAWRGGKAEIIPLTSEERKSFRKPRQHFEAFFKKNPEIAELDKKHNYYQREFARTQSKRSRHLDGFKHKPTFTLPSATQHPAWYSFKKNATYDNLDLGNGSIDLKLLTGEGENIRGKITYQFEADSRLKRFRKVGTKDKGGKAKSYLYADPILDKERKAEIKGIKLIFRPARPDGIPYLVFTCDIEDEKPTVKIWKEDTPEESNKASTAKKKSKRVYPPELVTLAIDFGQRHLGAITVCKNNKCQPEPISFLPGYLKKKKGYESKPVKAWLATIPGLSFNALKMHELEISSGMSRRFKDPTSKRQAGAEGKTSRTRRIPEDEKSWAGLRDHIAGMKEDFYKKAAHLIVQTALQN

SEQ ID NO: 61811 - protein, 1124 aa, Unknown
  Microbial source - Accession No. Ga255343_1026926
TLRGGLDHALADTKIPVSKGKDKSDRDPTKDERKARRILLALSWLSVESKRGAPARHIVAHDLDEQSDTRSNWKTVEALKEILKHRGLGESEIQLWVEDCSASLTAAIRDDAVWVNRSKAFDEAVESLDSSLTRDEVWDMLERFFGSRDAYLAPGEDSEESSETEQEDKAKDLVQKAGQWLSSRFGTGKGADFCRIAKVYSRIAAWAGKAEVGMTGAAAIANLAAALDKFSPPSKDLKGVLNLISGPGYKSATRNLLNKIVDEINITEKDLEKLKKAATEDKRKCKANTQSKGQRSYANAILKDVEDVCGFAYRNDKDGRPVSVVDYPKYGDNYSWGPARHSEYAVMLDHAARRVSSTHTWLKRAEAERRRFEKDAKRMNSVPCSVKAWLDTFCMERSEAMGALEPYRIRRRAVDGWDKVVRAWAGCQTEAERREAVHTVQSECQANDEKFGDAQLFEALADDDSCGVWLLSDGDSENSPDPQPLIDYVLATDAEFRKRHFKVPAYRHPDALLHPIFCDFGLSRWDIKFAVHEARKNTTRKTQDAMSDDDPHALSMTLWTGRAIESRRFRWQSKRLTHDLALDETRQREDGASEISRADRLGRAAAGVSPHGAVRIAHIFSDKMIWNGRLQAPRGQLNAIAARVADHGWDAKAKQMRDHLQWLITFSARLEPVGPWIEYKTGFPDDAPAKPFVSRRGDYAVKHQSNDERKGHAKLILSRLPGLRVLSVDLGHRYAAACAVWEALSAEQATEACQAAGHEPPKDSDLYLHLKSKETDGKVRTIIYRRIGADTLPDGKPHPAPWARLDRQFLIKLQGEDRQARKASPAEIAAVEELEKAVGRKPPDRRSMQVDDLMAEAVRTMRLSLRHHGRRARIAFNLTAGKKLLPGGREEVLTDGTRADLLADTLADWYDLFTGQGWGDEWAQQQWEAHVTPLLQGTALPQAPEDDEATFKARKKYRANLIKNLQPAAESLARDASLCRQLHCLWATHWRENDAALRKRLRWLRDWILPRGKAKDDRAIRHVGGLSLMRIATVRLLSQVQKAFHTRSEPEDLRKNIPPKGDDALSDFDRSLLDTLEHMREQRVKQLASRIAEAALGIGREHVFPTKKEREKKCWCGKVHDKKD

SEQ ID NO: 61812 - protein, 1493 aa, Unknown
  Microbial source - Accession No. Ga0255346_1002844
MPQQAKPPVTQRAYTLRLRGAGPSDISWRKALWQTHEGVNKGAKAFGDWLLTLRGGLDHTLADTKVKGGKGKPDRDPTDEERKARRVLLALSWLSVESKLGAPEGYIIASGEEAAEDRNGKVVTVLEELLKSRNVPNNEISEWKNDCSASLSAAIRDDAVWVNRSKAFDDAVKSVGCSLTREEAWDMLERFFGSRDAYLAPVKGSEDESSETEQEDKAKDLVQKAGQWLSSRFGTGKGADFCRMADVYGKIAAWADNAQADTTGNDAINNLAAALNESTLASNDLQGVLGLISGPGYKSATRNLLNQLATKTIVTQQDLANLKDKAIKDAQKCNQNTGSKGKRPYSDAILKNVEAVCGFTYLQDGGSARHSEFAVILDHAARRVSLAHTWIKRAEAERRRFEEDTQRLANVPGPVKDWLDSFCSERSGTSGALEPYRIRRRAVDGWKEVVTAWSKSSCSTSADRIAAARALQDDPEIDKFGDIQLFEALAEDDAVCVWHKEGDAAKAPDPQPLIDYALAAEAEFKKRHFKVPAYRHPDALLHPIFCDFGKSRWDICFDVHKNAQTPFPRALCLTLWTGNGMVSVPLCWQSKRLAHDLALGQDVQNDGSSEVARADRLGRAASNVTKSDEVKISGLFEQADWNGRLQAPRQQLEAIAVVRDNLSLSDQERERRMSGMMDRIRWLVTFSAKLQPQGPWCEFAEKLQLRINPQYWPHADTNKDRKGHARLILSRLPGLRVLSVDLGHRYAAACAVWEAVAKGDFEKECSNAKGKGAEIHYGPDGCKPEDAIYAHLVWPEKASNSATKKAKTEGRDKFHPVTIYRRIGADTLPDGTQHPAPWARLDRQFLIRLQGEEEGVREASNEEVWKVHQMEAELGRTAPIIDRLVKAGWGQSGKQRTRLEALRELGWKPASEAAGVSDDMDADEGDDRKPSLSVDELMSSAVRTMRLALKRHGDRARIAHYLITDEKTKPGGTKEKLDENGRVDLLQDALVMWHDLFSSRGWRDDAARQLWDEHVAKLSGYKAPEEIGEEFSGPERKKKQKENREKLHDVAKAMAQDVTIREALHDAWKKRWKDDDERWKKQLRWFKDWVLPRGKHASDPTIRKVGGLSLPRLATLTEFRRKVQVGFFTRLQPDGTRAETKEQFGQSALDALEHLREQRVKQLASRIAEAALGIGSEGGKGWEGNKRPRQHINDPRFAPCHAIVIEDLTHYRPEETRTRRENRQLMTWSSSKVKKYLAEACQLHGLHLREVSASYTSRQDSRTGAPGIRCQDVPVKEFMRSPFWRKQIAQAEKKQAEGKGDARERFLRDLNAMWKDKTVANWEKAGVIRVPVRGGEIFVSASRDSQGAKSLQADLNAAANIGLRALTDPDWPGKWWYVPCDPAGFRPIKDKVEGSTAVKLDQALRQPAQAQSGDAAKDKKKRGNKGGGKSKEVVNLWRDISSSPLECIEFGEWKEYAAYQNEVQCRVIRILEEQIKGRHKQPHEGSEEDDISF

SEQ ID NO: 61813 - protein, 1505 aa, Unknown
  Microbial source - Accession No. Ga0255355_1000451
MATENGKEQPSVTTQRAYTLRLCGLDKHDNTWRDRLWNTHEAVNKGAKAFGDWLLTMRGGLCHTLAEVDIPGIGKKLARNPTQQEIKNRRIVLALSWLSVESIHGAPESHLVSHDLDTVTGERKNWKTVDALHEILRSRHLCEEEVNQWVVDCRDSLSAKIREDAVWVNRSKAFDLAKARKGASLSREDIWDFLQPFFGNNYSYLKMKTAVTNTSENSEADSEESKDEPSEEKAKDLSQKAGQWLSSRFGTGTGADFCRFYEVYDAMAKHCQNIQAGVSGAAVCGSLADALHGFSPSSRSINGILELISGPGYKSATRNVLQQINNMQSVSQLDIDRVRDASEKDAQQSREKVGGKGSRPYANAVLQDVEAASSITYHNAGNGPSHHWQYAVILDHAARRVSMAHSWIKRAEEERSKFEIEKDKLQCVPSDARAWLDAYCARRSSESGAIDAYRIRRSAVDGWKQVVAEWAALLAKAKNAGSEPPSEAESARIQAARKLQDTIEKFGDIQLFESLSLPDAKCVWLTNGKPDAQPLMDYVAGTDAVSKKQRFKVPAYRHPDAFLHPVFCDFGNSRWSIDYAVHRAPEKLARAQQLLEKKKEELTRAEQALSKASDPSKRSSIEKKLKTLNVAFKQQEAEVLWLESHHAMTMGLWNGSRIEDTPLLWQSKRFGSDIGQAGAEHPLVASRADRFGRAVAMAKDNAPVVPSGLFDLADWNGRLQAPRRQLDAIAAIHDRTDLSVEEKRQLVAKRIRTIRWLVTFSAKLQSRGPFIAYAAQHGFDWRYGAHGIENKSREGLAKLVLCRLPGLRILSVDLGHRYAAACAVWETLSAAQMQNACLEAGMEAPSQRTLYLHLKHFVNGKEKKTIYRRIGADTLPDGSPHPASWARLDRQFLIKLQGEDRDARPATCDEVVAVEQLETELGYVRPIKRKGREHLVDELMSDALRTLRLGLQRHGARARIAFNLTATKRTRPGGIQELLDQESRIGLLTETLLEWNELYAGERWADELARDMWNKHIQPLLGGTILQETNNQDVTPSAAKRRMQREETREKLRPVAKQIAENDSLCRQLNVLWSTRWQIEDAAWRMRLRWMRRWLLPRGINRDPQFRKSIRDVGGLSLIRIASFKSLYQVQKAYWMRPHPDDLRRNIPERGDSSLTSFGQRVLDAMERMRENRVKQLASRIAEAALGIGDETSVNAKNGRQKRPTERSNDPRFAPCHAVVIEDLTHYRPDETQTRRENRQLMSWSSSKVKKYLGEACQLNGLYLREVPPAYTSRQDSRTGAPGLRCNDVTVAEFYTSRFWRKQVEAAEKNQKDGKKGDARERYLLSIDERIRSEANDRDVFRIPVKGGEIFVSACGQDGGSNANRKAPPGLQADLNAAANIGLRAIFDPDWEGRWWYIPCDATTICPVAKKFNGCKAVDSSKPLRIVAEKVAVSSSGIDEKRSGRKGIALTDGSRIVNLWRDPSGAPIRRDVPSNSEWQDYAEYWNKVQSRVIANLRKSYGLREI

SEQ ID NO: 61814 - protein, 475 aa, Unknown
  Microbial source - Accession No. Ga0255811_11272827
MDEPRITKVLKLHILKPADTLTWKELGDILRDTRYRVFRLANLAVSEAYLHFHLWRTGKNDLFERRTVGRLNRELREMLEKEGVSKENLDMVSNTGALPANVTDALAQYKLRAITKTAKWNEIIRGKCSLPIYRLDMAIPVRCDKKDQRRLSRTKDGDIVVELMVRQRPYPKVMLATQRNSLGDGQRAILDRLVDGADGYRQRCFEIKEDKRTRKWHLFVTYDFPVTTSARVSEERVVGVDLGYSCPLYAAVNTGFARLGRRHFVALAGAVRSLQTQTMRRRREIQRGGNVTTGGQSARAGHGRKRKLAPIEKLEGRIDAAYKTLNHQMSAAVIKFAGDNGAGVIQMEKLEGLAAELTGTFLGERWRYEELQRFITYKAAEAGIKIRMIDPRYTSRRCSACGHINEKFTRQFRDTEGEKGRVTRFICPECGYTADPDYNAARNISTIGIEDLIQQQRIKQGLTQNDKEGGKTNSK

SEQ ID NO: 61815 - protein, 1554 aa, Unknown
  Microbial source - Accession No. Ga0255812_10127107
VYTGGQGLPLHAGNRKLCFEKFHNQEIASLAAMSFKGAVLHVSSENRKEMDMTQQNRPSVTQRAYTLRLYGANSEDASWRKALWLTHEAVNNGAKTFGDWLLTLRGGLDHTLADAKVKGAKGKPDRDPSIEERKKRRILLALSWLSVESKRGAPAAYIIATGREITENRNSKVVAAFEEILKSRGLTDTEIAEWRSDCTASLSATIRDDAVWVNRSKAFDDAAKSVGRSLTREQLWDMLDPFFGSRDAYLAPTKSSEDDSLEEEQGEKAKDLVQKAGKWLSSRFGTGEGADFSRIADVYEKITAWADAFQVGKTTTGDEAIKNLAAALSEFKPVSNDLTGVLRLISGPGYKSATRNHLNSLFGKKRINQEDIQILKTKAANDAQQCRQNTGSKGYRPYANAILKDVEDACGFTYRTDKDNKDVSVSDYSKFEDGYRWGPARHSEFAVMLDHAARRVSLAHTWIKRAEVERRRFEDDALKREQVPENVKKWLDDFCWKRSEASGALESYRIRRRAVDGWKNIVGAWSKAECRTMEDRITAARALQDDPDIEKFGDIQLFEALAEDDAVCVWYKDGDPAKEPEPQNLIDYALAAEADYKKRQFKVPAYRHPDALLHPVFCDFGESRWDISFSVHQQERNKSKLNNKKMITQGSPLRGLSLTLLTNIGIKPVLLCWQSKRLARDLALVSNADKGHVVNVSRADRLGRAASAVTENDTVAIESIFEEKKWNGRLQAPRRQLEAIAAVQNNSRFSAEERARRIQRMRERIRWVVTFSARLQPQGPWCEYAEKHRFKPDPRYWPHAEINKNRKGYARLILSRLPGLRVLSVDLGHRYAAACVVWEAVDAAHIKEACRAAGRESPNESDLYLHLKTKGQDGKERITIYRRIGADALPGNTPHPASWARLDRQFLIKLQGEEEGAREASNEEIWAVHRLESGLGRVAPLIDKLIAAGWGGTDKQKARLEALKQLGWSDRTAAASAGAGAEADEESGGIVPSLAVDELMSSAVRTMRLGLKRHGDRARIAFYLVTEEKTMPGGVKNKLDEQGKIDLITDALILWHDLFSSRGWCDDAAKKLWDDYIAKLSVYRALEEGDKDDSGSERRKQKDENRRKLYNVAEALLQDTDLQQRLHNAWKKRWEEDDEWWKRQLRWFRDWLLPRGKHTRDPGIRKAGGLSLIRIATLTEFRRKVQVGFFTRLRPDGTREEIKEQFGQSTLDALEHLREQRVKQLASRIVEGALGVGSESPRHWDGCKRPRRCINDQRFAPCHAVVIEDLTHYRPEETRTRRENRQLMIWSSSKVKKFLSEACQLYGLHLREVSPSYTSRQDSRTGAPGIRCQDVSVCEFMRSPFWRKQVKKAKAKQDKNEGDAREKFLCDVDALWNDKTAADWVKAGFIRVPINGGEIFVSADPNSPAANGLQADLNAAANIGLRALSDPDWPGRWWYVPCERADFRPVKDKVEGSAVVKLNQVLRQPTQGKKDGINKKKKDGDSRVVATNEVVNLWRDISSLPLESAEAGEWKEYAAYTKEVQYRVVNILKKQIQGRCGQPHDRHREDDISF

SEQ ID NO: 61816 - protein, 1154 aa, Unknown
  Microbial source - Accession No. Ga0272446_1000057
LHEDFICQSLEKANIDFSEYLRLFENLLELKGKKQRETDKELKIKIETTIKNEEEKKKKLEEILRKKICELYQITAKEWNNKFVDEKGKPLFKKKSYDILTEAPILKFLEMIYRDDKEKISIIHKFHGFFTYFTGFNQNRENYYSDKELSTGVANRIINENLPKFCQNICKFSKSRELFESEQELKKHFDIFELKYYNNALTQDGIDKYNGCIGEFNHFVSHYNQQHKNKTRLQSFNTLFKQIGSLKKKKEFIFEIDEKDNTLEKVLNQFVDQSARVNKKKKILKLSCILCSTEDLNGIYINKKSISEVSRMVLANWDTLSQELVEAEVWHLNKETEYPKEKENTSLQEIVDSLKGKESLFKEEFQKFDEKNRFLSALTHLLKLKFDFYESNLTKLKILLEKKSDLRKKESKDVIKGFCDSAIDLIRFVRLFSVKTPPENINTDFYNLHKEILEDPDYPVFKWYDAIRNNLTKKPYSLDKIKLNFDKGNLLGGWTDSPIGNTQYSAFLFRKESEYFLGICLNTRLFDENKNPHAYKKDGKMEKMVFTQLDAKTIYGSIYRGKYKSKYSDDKKVMSDSELIDRIKSILESQKKHYTKLDKIIQTKFDKATDLARVISTNKFYSLNFVNISEEYLRSSTVNADKPLYLFKITNKDFSKKDKSKKDNLHTKYWKVLFENKDNIIKLNGQAELFFRPASIKEKDKVKVETFEKKRIIDHAIKHARFARDHYEFHVPITLNFGCGEYKKITDKVRDLVKSKKAGMNIIGIDRGEKHLAYYSIIDPNGNILEQGSLNKDLLGKDYAQKLEKIAKERQEARKNWEEITRIKDIKEGYISQVVKRIADLAVKYEALIVFEDLNIGFKRGRQKIESSVYQKLELAIAKKLSFYVSKESEENEIGSVTKALQLVPPINNYGDIKGKQFGIILYTRANYTSQTDPLTGWRKSIYIKKGSNQYIKSQILDNFSDIYFDGEDYVFVYKDDNDKEWRLYSGINGRPLDRYRGKKGKSQNTWIIEKQDHVKILDTLFSKFDKKRSIHAQIKEGIELTKDSPNVTSYESLKYAIDLIMQIRNTGIEESDKDFILSPVRNEDGIHFDSRKAKKDQPDSGDANGAYNIARKGLLMCKRIIESEKPDLFIKEKEWDKAASNWDKEFVRQKWTM

SEQ ID NO: 61817 - protein, 1321 aa, Unknown
  Microbial source - Accession No. Ga02722446_1000164
MFDQFTNLYELSKTLRFELKPVGKTRENMNEHLKYDEVLKTFMADQKIEDAYQTLKPVLDALHERFINDSLELDEVKNIDFSEYLEKYRDKDLKNKDFEALERKLRVKFKKLYEKVGENWIAKAGFNDKGKPVFKEKSFKILTEKGVLDFIKKNADNFTFVSKEQLEGAIKVFENFFTYFTGFNRNRENYYETGKEAYTAVATRIIHDNLPKFCDNLIVFESRSKDYLGAYELLKGRGLSLVTKEGRPLMPIVDNIFRIDYFRKCLSQAQIEEYNKQIGNANFVVNLYNQVFSGNSDFKKLLSFKLLYKQIGCGKRRSFFVELTHDTIAEADKARGEGKKAFSVEELVLLAKQAGEIYFQGKSDDGIINTVPELLDYLEKKSDYRGIYWSKTAINTVSGKYFANWFDLKNKFKEAKVFEKNKKGSEEEVKIPDVVELEDLFSVLNEWSDWKTTLFKSSIMQDAKKRELIEKSPNASTALLSLLFADIKDHAECFIDEANEVSQVKDFKKEENKILIKLWMDHALVVCKMLKYFLVREDKVKKVKGALMDATIVEALNNILSGQVEVDKNGKKIAAEVDWFEWYNYFRNYLTKKPQDDAKKNKLKLNFECASLLGGWSDGQEKEKGAVLLKKDNFYYLGILKKKNLFDTEKENNPVYQNPTFSAGRLILANLKFSTLAGKGFLYEFGKAYGDMGAEDPDKAIKCLKKIIKDRYEEKYPLLARIAATHYSDKKVFDKDIQETLKECYVCRFEPVSWIKVEEYVDDGELYLFQIYSKDFATNNTGKNDLQTLYWKAIFDEYSSFQLNGRGEIFYRKQAIKEKIVKVGYEGKPWVIADKRFTLEEGKFAFHCPIKINYKAKNYSQPKFAFSEINKIINDGFGKFSNIYFLGIDRGEKHLAYYCLVDQNSKIIEQGSLNMPFVDASGNPRMVKTERKFIQEDGKEQLEIVECKDYNELLEARAGNRDYARKNWQVIGTIKELKEGYISQVVHKIAGLCANKEHPVFIVLEDLNTGFKRGRQKIEKSVYQKLELALAKKLNFLVDKNAKLGEVGSVTKALQLTPPVNHYADIKNKKQVGVMLYTRANYTSQTDPKTGWRKSVYLKPGSEENIKNQILEQFSDILFDGKDFVFVYADANTGTEWKLYSGINGISLDRFTVKKGVKNEWCIEKQDIVEILEGVFSKFEKNRSFLSQIKDEGRELTKISDHTAWESLRFAIELIQKIRNTGITSRDNDFLLSPVRDSAGNHFDSRVYLDKEQRGEKIDLPSCGDANGAYNIARKGIIMWEHINRGYRPYVSDDEWDAWLAGVTNWEKWREGNEKLLKYNK

SEQ ID NO: 61818 - protein, 1174 aa, Unknown
  Microbial source - Accession No. Ga0272446_1001728
MQNYKITKTIRFKLEANPEQTEALLNQVEKSNQAFDLVFFTSKLKNFADGMRDYLMFQKGKEPEKWQFRKNFTIKKDWLKVYAKEELANIKQKQKEEQDKKSRRQPIQLNEGAKEIIQKSLGEVYAIYQELIQDVSKELNERARRERTGLLLKRLQEKNNLPLLCDLTEHISSGNETDNSIYELLKEKEMLQKELLQGIAEFLPAQSSGLPIAKATFNYYTINKKPTDYAQKIEEQLKELSISDYSKKIQINSKLFLGNDNFKKVMEDIRNRLKKDNITHLLFGHVPASISLGYEYRSLRQILKNIKAEQKKKFNELMMEDDFTYDKLKKEQDLYLFTSIKKEQFDEYLDKTRKIQELADKINDKSLSKEEKENLTSKKQTIAKKRGELLRDKFIDWKKFMEIYRSVAQKHGKILASLKGIEKEKVESQLLKYWALILKVNAQYKLVLIPRDKVQDAKKWIENHKNNKKTDTQELPQLYWFESLTFKSLQKLCWGHAETDNNEFRKNIISIIPKNKNNKPYTGEHEFEGKEQDKINFYKKVLQDKYTRDVLHLPFAQIDKEIISKNFDTLEDFKITLEKICYRRQVILNQDAEETLTKQFKAQILNITSLDLSRKSNESALKPHTQIWKNFWSDSNEKQHFDIRLNPEITITYRKPKPSRVHKYGKNSQNYDEKKKNRYLNPQFTLVTTMSEHCNAPQKNLSFITEEELKKEIDTFNQKFREKNQIKFAIGLDNGETELSTLGIFVPDFNKNTNEERLAQLRKVQEYGFEALTIKNLNYAERDYNGNPRKMIDNPSYFLNKSLYMRTFIKTEQEYERMFAEQFEKKHLLSLDLSAAKVICGHIVTNGDTRALFNLWMRHAERLIYFANDHIKEETAKKVLIKTIQELLPAEKEKLAESISKEKKYAKLSEQEKLRYFTWLFEDRKLYSFNEEENKKFNDILERKGNYAIGTVFSVTYLGEELVDVKSVFDIRLIFKKREEFYSILSEEEIMKELSRYNTNRTSHDLSNQELDLKLKTYKETIVANAIGVIDFLYKQYKQRFGGEGLIVKEDFDTPKIQEDLERFSGNIYRILERKLYQKFQNYGLVPPIKSLLSLRNQKVALDSIFNLGVVSFANPDKTSQQCPVCLEGKLYHGKKCDKCGFRATMMHSNDGIAGYNIAKRGFNNFQSLLPLKQ

SEQ ID NO: 61819 - protein, 1267 aa, Unknown
  Microbial source - Accession No. Ga0272446_1001728
MKNFIAKYSVSKTLRFELKPIGKTLENIQKNGLISKDEMLAENYKEMKKTIDEFHKEFIHKTLSNASLDKENLKEIAELYTAPAEKRKEDNYKNQLKAYQKALRKEIVDHFKNDELFKNLFAEKLIKNHLQGFAQQKGLRFYSEFNNFTTYFVGFHENRKNIYTDEDKRTSIAYRLIHENLPKFIHNIAVFEKIQEKKIPLTILENQFMSKLGNDTLADVFRLEYYNCLLTQNSIDFINQLIGGYVNENQEKIQGLNEYINLYNQQQKDKKDRLPKMKMLYKQILSDRESISFLPQSFKESQEVLDAIRDYYLSNLLEYRAEDKEEPENVLEKIQERLSHIADYDLSKIYIRNDKAITDISQTIFGHWGLIHSALEFDFRQKNVGKKTTQKQEEDVEKYLKSDYYSIAEIENALISYKESTQNEKLVEVFNKTSHPIADYFKTYFKAKEKSKEGKEYTLIANIQAKYTCVEGLLNTDYPKDKKLHTDKDNLRNLKAFLDAILELLHFVKPLIISKNDFLEKDENFYSSIEPYYKQLELLIPLYNKVRNFATQKPYSTEKIKLNFENSTLLNGWDKNKESDNTCVLFRKGEDFYLGIMNKKYNKIFENVPKPKSDTTFLKMEYKLLPGANKMLPKVFFSKKNIAYYAPDSEILRIRNHSTHTKDGEPQKGYEKQAFKLEDCHKMIDFFKSSIEKHPEWKNFNFTFSNTQSYQSIDEFYREVEEQGYSISFVEVDEEYINQCVNEGKLYLFQIYNKDFSKNKKSKGKPNLHTLYWKALFDPENLKDVIYKLNGEAEVFYRKKSISAENIIVHKAQKPIENKNPLNLTKYSIFQYDIIKDRHYTEDKFLFHVPITLNFKSKKGKENINQEVLDYLKENPDVNIIGIDRGERHLLYLTVINSKGQILHQESLNTLKNETYNIQTDYHALLHEKEKDRDKARKEWGVIENIKELKEGYLSAIIHNIAKLMVQYNAIVVMEDLNSGFKRGRIKVEKQVYQKFEKMLIEKLNYLVFKDVPNYEPGGLYNALQLTSKFESFEKLGKQSGFLFYIPAWNTSKIDPTTGFVNLFGGIKYESIHQAVNFFEKFQSIRYNTKEAYFEFAFDYNDFTTKAEGTKTQWTVCTHGERIINFRNTEKNSEWDSKTVQLTQQIKNLLNEYHIAYEQGQDIKPAITAQNDKKFFEELLKQFKNTLQMRNSVINSDVDYLISPVMNAKGEFFDTRKTDSTLPQNADANGAYHIAKKGLLHVQQIIDGVKKTDLTNKKWLKFVQNNL

SEQ ID NO: 61820 - protein, 583 aa, Unknown
  Microbial source - Accession No. Ga0272446_1001929
MKVVEFKLQLTDDQASKVDTWLNQLRWVWNEALRRVNEERQRYYRKQVNEDGTFGKVEDTGEVWQVWYNKEIKEKAYCCHIADKTRYADYAPCCEIRPYRHQQYANLKELKKWARNAATQKCNPDKPWLKDIPSCFSDFVARDLIKAWEQALSKTNPARYPRFKGNRDTLRSLTDENGHDHLRKDIRGKRNWLVKLNNKLGFMRIIGKHDRFPKDFTVVRICKRASGYYLQVTSKDLEDKTLKRNDRPVGIDVGLKFIVATDQGRVVEPKRYARVAERRLRLLQRKAARRRDAVQKLEGCKGKNLEKVNQQIALLHENIKYRRRQFNHKLSTKLVREYGAIAVEKLQLKNLMRRPEPKLKENGTGYARNNAAAKSGLNKSFADAGLGQLLEMLKTKAEAAGRLFKEVDPSYTSQECSNCHEQVKKSLSTRTHVCPSCGFVEDRDVNAAKNILEKANFSSDYRCWDKREVKPASASSVEGQQESDSGSLDLGKELRAEDALRLTQSQKNNDHLLVEVNSPSKEAVIPTGSGLDEVRLLQQMHVNSETSTPLASEAVIDQVKASTPKPKPRKVKRCLQNQPEAPT

SEQ ID NO: 61821 - protein, 979 aa, Unknown
  Microbial source - Accession No. Ga0272446_1017314
MAELDPTQRAYTLRLQGQRREDYSWSDALWATHEAVNKGVKVFGDWLLTLRGGLDPGLAERPVKDKKGERPPEDKERKNRRILLALSWLSVESEQGAPEKYIVASGRDLTSERIEKVKTAFHEILKCKGLDENQIQAWTTDCLPSLSAAIREDAVWVNRNKAFEDAKRQYDITDEDVWDILEPFLGNVDAYFFIKDLPADDQDESAEESSGGGEEPKDLVKQAGQWLSSRFGTGKGADFDRMSAVYEKMAELTSRLEGEMTSGAFFESLAEHLSEFNPDSSEPQAILKLVSGPGYKSATRNLIKKFAEQPTLNSDDLMNFTNAAREDAQESRNKVGSKGQRNYADAILSSVERVCGFTYLTASDGSDVSVETRYQLPENYTWGTSRHKEFAVMLDHAARRVSIAHSWIKKAEARRNKFEADAQKIKDIHPDVKAYLDAYCESRASLVGSLEEYLIRPRAVSGWEEVVKAWAKLEKQPGWDNKEPDQRKQARVDVARELQDQIEKFGDIQLFESLASDDATLVWHKDGKADGEPDPELLKNYVKATVANFNKQRFKVPAYRHPDAYYHPVFCDFGNSRWDVRFSVHEAHTVLAEKKAQLERLQQEMQTTRNLTKKSKLQSQIKDLEEELRWLENPRLVQMKLWTGKSIAPVILRWQSKRLVQDLALKQNASTAPEVVSVSRADRLGRAAAGLSANHIVQVKNIFDEDHWNGRLQAPREQLEELARHVEKHGWDARAIKLRRSIQWLVTFSPKLEPWGPWCEYVNTHPDFKGLKTKNPSAWPHAEENKKRSGDARLILCRLPNLRVLSVDLGHRYAAACAVWETLSKEDFIKQTEGKKIKAGGTGSDSLYCHVEHECDGKKRTIIFRRIGSDILPDGSEHPAPWARLDRQFFIKLQGEQEGAREASNEEIWQVHELEKELGVNTPLIDRLVTTGWGETDGQQARLEDLRKRGWKPKTSLGITVDESAEEHDEEEARFRRFP

SEQ ID NO: 61822 - protein, 552 aa, Unknown
  Microbial source - Accession No. Ga0272447_1003507
LGDVLTKETTRVIVPLVGFEAKLLNTKSTYVAVHAKLEFLSNEDKREVLDLMRRFSSAYRWIYNRLIEGVNPAEVKRVSGPVSRFGLNSEYNNSALQLARYKILSLNSKGANPRKIIFGTRTLFNRLCRKGSLNSRARAKRVWRERRNGNLLSLGNKRNVSGNYVLTLSLINGELWLRINMGTSENSESGKKESRYIYAKVKTSHPYLNHILEVVGKSGIASVNVYLKLIDGKVYAIFTKKIDLPEPVLTKYYGVLGVDINARPFHLALAVAEPDGNLRKYSTISLEEAIRIRERYRGESSAKVLDNFYWLVAHQVVDLAKNEGVAIAIENIFNLPKGFRGDGNKKLRRILGRFAYRSILERIVRVASREGVEVWGVNPAYTSVIGMLKYAPMYSLSKDVAAAYVIGRRALGFPEKVPKRYLQLMASPEYREAVINWFNQELRTLEEKIGGERNEYKLNRLKREKESLEKAFNHLNKFLSLEDSPEGLQRGLTYGRNPEEPKGDSLHLWKALQVGVLRPLLGQKVPRDLSVLKPLLVGGVWKGRGGTHLGPS

SEQ ID NO: 61823 - protein, 1392 aa, Unknown
  Microbial source - Accession No. Ga0272448_1000001
MAESLPATQRAYTLRLRGADPDDESWREALWRTHEAVNKGAKAFGDWLLTLRGGLSHELADEPVKAKGGRRQPSADEKRDRRIVLALSWLSVESERGAPQQFIVASGKDNDKQRQHKLVKALRDILQKRGVGKAELDEWVKACEGPLGAAIREDAVWVNRSAAFDQAVKRIGKSLSRDQVWDLLERFFGSKNAYLAPIVLKDEAEPSEKAKDLVQKAGQWLSSRFGKGKGAKFEVLSGAYQEIERWAKSARPSSPAHLMAHLARLLKAPSEDLDGVLSIISGPGYKSATRNLLKKLSGQQRVSSEDLARLAKTAADDRVKCKSKVGEKGKRPWADTILEDVQRACGFKYIPDGGPARHRQFAVMLDHAARRVSVAHTWIKRAEAKRRSFEEDARKIGQVPSQAKQWLDDFCLERSRSSGSLEGYRIRKRAADGWEHVVSRWAGADCTTVADRIAVVRELQSDPEIDKFGDIQLFEALAEDDATCVWKPEGEPDPQPLKDYVAAKDAEFKRRRFKVPAYRHPDPLLHPIFCDFGCSRWDIKFDVHEAYKRKERKSTQTQTNPHGLTMRLWDGTDVSDVRLRWRTKRLFGDLNLGGAGAGKDVSRADRLGRAAAGAQEGEAVQIAGLFEDKDWNGRLQAPRPQLDAIARRVDAHGWDKQAVRMRARLEWLLTFSARLRPRGPWTEFAKKNDLRPDPVYWPHAAENKNRQGRGRLILSRLPGLRLLSVDLGHRYAAACAVWEAVSAEAVKKACKEAGHPNVKEDDLYLHLKRKDQGKLRTTIYRRIGADRLGQPTPRKEVAHPAPWARLERQFLIKLQGEDETPRKARKDEFKAVENLERELGRERSEADKLPHRIDELMSEAVRTVRLALGRHGNRARIAHYLVATEKTMPGGVVQSLDQSGRVRQIAYALELWYELAASSKWKDDWAAELWEKQAWAKDVPLQKRDEETVTRQALKKEKKERCGKLEAAAENLLRDGARCRDLSARWAKRWGEEDKKFRERLRWLRDWILPRGKKAAKNPAIRHVGGLSLTRLATIRSLWQVQKAFFTRMTPEGRRRDEDGRPLTAGEGFGQKVLDALDRMRDQRVKQLASRIVEAALGVGKEQEKCANRDPRRPRECVFEPCHAIVIENLTNYRPEETRTRRENRQLMRWSAGKVKKYLSELCQLHGLHLREVGAEYTSRQDSRTGAPGIRCQDVPVREFMRSPFWRKQVAQAEKKLEKGEGGARERLLCELNANWKDSSEKELKEAGVIRVPLNSGEIFVSADAKSPAAKGLQADLNAAANIGLRALLDPDWPGAWWYVPCDAKTMKPSKEEASGSAAVDMEKPLVQVSEAKPGARGGRGKSEKPVVNLWRDVSARALEPGDWRRWEPYWNDVSARVVRLLRKQQGLPDFA

SEQ ID NO: 61824 - protein, 634 aa, Unknown
  Microbial source - Accession No. Ga0272448_1000002
MVSEEGIMLALKLKIIPTEKQAEILDAMFWKWASICSRMAKMKKMMSIKEIREELSRKTPSNSDIWFSKTQLWQAKDNVENHKKALKNFEKRQESVLDKLKNKVKDIKEAIDDESKRDIDPNDSSKFRIKAWIKEGNLNSSKFYTLKKWQKFLQEDEKRVKKIESTIEKLKKGNIVFSPTKISLHKDEYSINFGSSKLLLNFFYKYNKKSGINLMDQLENKFNEFQNGLKIIFSPLQPIRGSSKRSAEFLRNNIINFLMYSLYAKLFGIPRSIKALKKSNKDENKLKLEEKLKKKMSSFNETIKEFEKMIGRKLSDNESKILNDESKKFFEIIKSDNKHIPSEECLKLLKDISEEIYNSNIDFKPYKYLILIRKPLSKFKSKKLYNLKPTDYKYYLQLSYELFPKQLIATKTILGIDRGVNHLLAVSVFDPLQNRFVYNKLIENPVFKWKKRYRNLKRSIRNRERRIRALTGAHIHENQLIKKLKSMKNKINVLYHNVSKNIVDLAKKYESTIVLERLENLKQHGRSKGKRYKKLNYVLSNFDYKKIESLISYKAKKEGVPVSNINPRYTSKTCAKCLLEVNQSELKNEYNRDSKNPKIGRCNIHGQIDADLNAARVIALCYFKNLNEPGILSP

SEQ ID NO: 61825 - protein, 1437 aa, Unknown
  Microbial source - Accession No. Ga0272448_1000009
MAKQVPVRQRAYTLRLRGLDAQDQSWRDALWRTHEAVNKGAKAFGDWLLTLRGGLDHALADAKVEAGKAKPDRDPTDEERKGRRILLALSWLSVESEKGAPEKYVVPHDLDKESGMRSNWKTVDALREILKGRGLDEREIESWVQDCSASLSATIRDDAVWVNRSKAFDEAVKSIGSSLTRDEVWDMLQPFFGSREAYLAPAEPPEEESADVRQEDKAKDLVQKAGQWLSSRFGTGKGANFRRMATIYEKIANWAGKARSGMSGDKAIADLATALSEFSPASNDLQGVLGLISGPGHKSATRNLLNGFPTKTSVTQGDFQNLQDKARQDAQKCKNKTGSKGQRDYADAVLRYVESACGFTYLQNSGSARHSEFAVMLDHAARQVSSVHTWIKRAEAERRRFEEDAKRMANVPGPAKKWLDSYCRERSRRSGALDRYRIHRRAVDGWKEVVAAWSKADCKTAEDRIAAARALQDDPEIQKFGDIQLFEALADDDALCVWHKDGDSAKAADPQPLIDYVLATDAEFKKRDFKVPAYRHPDALLHPVFCDFGCSRWDIEFAVHEARRKTRRKHKPIPTDDPHALSMTLWTGSTFKSQKLRWQSKRLTHDLALGQVKQDDGAAEVVARADRLGRAAADVGASATVRIAGIFEQKDWNGRLQAPRAQLNAIAARVTRHGWDDKAKQMRDRLRWLIAFSARLQPSGPWVEYARAFPDDAPAKPFVSRKGDYAVRHQDNDARKGHAKLILSRLPGLRLLSVDLGHRYAAACAVWETLSTEQVRKACQEAGNEPPKDSDLYLHLKNGQRTVVYRRIGPDTIEAVDESTGEIKPVPHPAPWARLDRQFLIKLQGEDHEARKASPAEAEAVQELERAVGREPPDQRSLRVDDLMSKTVHTVRLALQRHGRRASIAFNLTAAKRLLPGGREEDLDEEGRVELLADRLSDWYTLFKGKGWNDEWAKEQWETHIAPLLQGAALPQISEDAEATPKARKKYRADLTEQLKPAAESLARNPSLCKKLHCLWATRWRDDDGALRKRLRWLRDWILPRGKNARRDPAIRHVGGLSLTRIATIKALYQVQKAFRTRPEPDDLRKNIPAKGDDALRDFGRSVLDVMEHMREQRVKQLASRIAEAALGVGRVKRFAGGKDPKRPREQVDRPCHAIVIENLAHYRPEETRTRRENRQLMTWSSSKVRKYLAEACQLYGLHLSEVNAGYTSRQDSRTGAPGIRCQDVPVQKFMQSPSWRREVAHAEKKHAEGKSEARERFLCDLNAKWKGREAEWEKAGTVRIPLNGGEIFVSAGPCKCCERNDRNGPAGLQADLNAAANIGLKALTDPDWPGKWWYVPCDPKTFKPVKDKVAGSAAIRLDKPLKDLPAAQGTDGARKKPSKTKAQQREIVNLWRDVSSQPISANDDWREYKPYWDHVQERVVKILRQWAGLTPNYKNQ

SEQ ID NO: 61826 - protein, 1355 aa, Unknown
  Microbial source - Accession No. Ga0272448_1000011
MSKVNNGFSSLCVWSDFTRKFSLSKTLRFELKPVGRTEDFLKQNKVFEKDKTIDDSYNQAKFYFDKLHQKFINESLSPSSDSSNLKNIDLEYFAKQFLKLKSEIQKLKSEKKQKEANNKEKEINNLRKAYYKEIKSLLDKKAEEWREVYKKRGIKFSKTDLRQRGTDLLMKSGILGILKYEFPKEKEEEFKSKDWPSLFVDDKANPGNKVYIFDSFDDFATYLIKFQETRKNLYKDDGTSTAVATRVISNFEKFLNNKKIFEDKYINHWKQIEITDEEKKIFEIDYYYSCFTQGGIDEYNKIIGQINQKTKQYRDKNKIEKSELPLFKVLDKQILGEVIKERELIAETETEEEVFINRFKEFIDQNKQRILRAQNLMNDLINEEFENEYSGIYLKNSAINTIANRWFKNTTEFLLKLPQASKSKENKESPKVKPFVSLLDIKNALDDFEKEKDSLGTIFKDKYYKTKESDEVPLNSDSQESYWKQFLKIWGYEFNQLFEDKFNEEGVKIFWGYTKDLVEQAESLNSFSRKKEEIILVKNHCDAALRIYQMMKYFALEAKKQDDIPLDYSTEFYNRFNEYYQDFKFIRYYDAIRNFVTKKPSNEDKIKLNFESGSLLTGFDKNKESEKLGIILKNKNNNKYFLGIINKKHNKIFESKNENEFIGNPAKDLYEKMELKLFPDPKKMIPKIAFADKNKKDFGWTQEIQKIKEDFENFQENKKDNKDLKFDKNKLSKLIEYYQNCLEKGNYKKEFEFELKRPEEYQSMSEFNQDIEKKNYKIKFIPVKDSYIDDKVKNGELYLFEISNKDFIWPNQKKNIHTLYFLSLFSEKNIQKPIFRLGANAEIFYRQKSEKATKEKRGEKEIIKYKRYTEDKIFLHLPIEINYGCPKDTNKNEYNKKIIEFLNKNKDEINIIGIDRGEKNLLYYTAINQKGKILDHRSLNEINGVNYLEKLIEREKERQINRQSWEPVVKIKDLKKGYLSYVVREIADLVEKYNAIIVLEDLNMRFKQVRGGIERSIYQQFEKQLIDKLGYLVFKDDRGPESPGAVLNGYQLVAPFTTFKDLGKQTGIIFYTNAEYTSKTDPITGYRRNIYISNSASQKKIKENLINKLKEICWDEKENSYFFTYNQKDFGSPISKEWTLYSKVPRVRREKNNSTGYWEYKPIDLNKEFEDLFKKCEINEKSIDIFSEIKELIKNNEGKLTQKQEFDGKNKNFYERFIYLFNLLLEIRNTISLQVKLDKRGNEIKLDEIDYGVDFFASPVKPFFTTAGVRLVGRQIEGGKIQKEKKEEFTIKNFADFERLFKGCSSDGFDSDGVGAYNIARKGIMILERIKQNPKDPDLYISKEDWDSFVLRNLS

SEQ ID NO: 61827 - protein, 1069 aa, Unknown
  Microbial source - Accession No. Ga0272448_100062
MANISLKKALQQFPQTTLSKVTNPKTGKVQTRNVLKTMQCGLAISLTPKQRKVELEELSPDKKKLLDEYIDTFENKKQLILEDFYHYYEKSIWDFLIYCSRIKDTTETTYIVIPELPEITTKIKKSDGTYLKVKAYKGISNTTGNIHKTLYWFADDIDTKDGCTKVQFQYTEQRKEYITTDNYEKYNFDPALFELQPDTQQISNRISFFYMTNAQKKDKNGIYHETPKYQEYKKKGISIKGIVDDIEIDIKEPLRTKTAAVLKAFVDKLQESIKEIESVISEKNERIALLNKEDPKNNFPEFFVTNLKEDDKKLLSELTQLQIEDRDVKKFSELYNTLAKSFNQILNNAIQTYISIKLKESKIKQSDKEQEGKRLWDTYHLNHLKGIPSFPQMKNESQGKITAEMIYHFIQEQLQQYKNFSAFDHLLLDKNDFIFTDQKRKLSEDTVEQEQEWKEQWKTIKEKENNSFILTLRKILWRKNNIPGKKLMHYAHYLVQQGKITTNSAIVKALIEYALQELLKKQEHLSCEQFSSDQKAKREFCDYARIIISFIAYQLKKEEKRKEARNLELQIDDMSGNYKGTAFDLLKKGESNILPLSGFDFDNHGTKKGACLVFRNTTDHGNIRTHWYFALNLYNKIHFEEFDQQYDHPLEYPVDQYFVLASKGNDKTVSHHIYQLSPKEFDPGSKTMLIPLLLGTRQLREYITNFEISPFKNLLYFNSAEIQRIRNHKEEQYFLNLVTTRPEVEAYELTQEKKKGLIGIDRGENTVAWAALVNTQGNPLFEGKDERNFIELAPKFGKKFREEYKEISKRQSHGSVKKLNIQGRVKKVIEGVGAKIISNALEYGLQIVLENLDRGFGRHGKNTFVGVRQFTHLQKFIESKLKQNNISFKKDSILQTVPAAYTSKMCSNCGVINSLTGKEDFIAAVIEQFKDHPQQKDPKISCNKLCINLDQEITSWDRNKKREVVENSFEKIKAIFSNTKIQKHEAYVEIILKKLLNPRKEKADLFKCNFCGHTCHADKQAALNIARFSLLPYRSESEKKKGITAISKLEEEYQQRLNDGIFQRGSLIL

SEQ ID NO: 61828 - protein, 1472 aa, Unknown
  Microbial source - Accession No. Ga0272448_1000167
MAHQAAVTQRAYTLRLRGEDPQDRSWRDALWATHEAVNKGAKAFGDWLLTLRGGLDHALADAKVEGGKGKPDRDPTDEERKGRRILLALSWLSVESEKGAPEEYLVPHDLDKQSGARSNWKTVDALREILKGRGLGESEIESWVQDCSASLTAAIRDDAVWVNRSKAFDDLCPRFRGLDRDYAAKTISFFFGNQGTYLALPNRDNDEDATTAVQSGDSSDFRERARQWVSTNFGTGTKSDNARICSALHTLATSNLMSFDGCSKADFLKHLATLLGRSEPNKEPEEVLRIAIGWTTGRPSAGLLAIKSLPDPVTANDIDTLQRKFADEKAKKEEKADLLRVPEWIRTFRETVERECGIPYVGKRDHIGEYSVMLDHAARRVSIVHSWIKRAEAERRRFDEDAKRMANVPEPAKNWLETFCLERSGASGARDQYRIRRRAVDGWEEVVAAWSKADCKTAEDRIAAARALQDDPEIQKFGDIQLFEALADDDALCVWHKDGDSAKAPDPQPLIDYVLASDAESKKGRFKVPAYRHPDALLHPVFCDFGKSRWDIKFDVHEARKSTARKKEGATQNSDPHALSMTLWTGSTFKSQKLRWQSKRLTHDLALGQGKQDHRAPEVARADRLGRAAAGVPASATVRIAGIFEQKDWNGRLQAPRARLNAIAARVARHGWDDKAKRMRARLRWLITFSARLQPSGPWVEYTATFPDDASAKPFVSRKGDYAVRHQGNDAREGHAKLVLSRLPGLRVLSVDLGHRYAAACAVWETLAKEVFEKERHDAEAKGAHVVLGPEGCKPEEAIYAHFVWPEKESNAATKKARQEGREKFHPVTVYRRIGPDELVDTSTGEVKEHPAPWARLDRQFLIKLQGEDHEARKASPAEVEAVQELERAVGREPPDQRSLRVDDLMSETVRTVRLALQRHGRRARIAFNLTASKRLLPGGREEVLTDEGRVGLLADTLADWYALFAGKGWNDEWARQQWETYVTPLLQGAALPQIPEDAEATPKARKKYRADLTENLKPAAESLAQNEPLRMKLHCLWATRWSKDDIALRKCLRWLRDWILPRGKKVKEKAGRAIRHVGGLSLTRIATIKSLYQVQKAFHMRPEPEDLRKNAPSKGDDALLDFGRSILDVMEHLREQRVKQLASRIVEAALGIGIERQVGKKTPKRPRQRLYWKDEKGNEHGDRRFAPCHAVVIENLTHYRPDETRTRRENRQLMSWSSSKVKKYLAEACQLNGLHLREVQAGYTSRQDSRTGAPGVRCQDVPVKEFMRSPFWRKQVAQAEKKQAGDKGDARERLLCDLNAEWKGKPEADWEKAGTVRVPLKGGEIFVSARPCSCCKHGKRGGAPGLQADLNAAANIGLKALTDPDWPGKWWYVPCDPTNFKPARDKVAGSAAICLDKPLKNAPAAQDTEGPRKKRDEAGARSRGVVYLWRDVSSRPISANDAWREFTPYWNDVQARVVNILQQLAKNQGVR

SEQ ID NO: 61829 - protein, 1470 aa, Unknown
  Microbial source - Accession No. Ga0272448_1002516
MVKQAAVTQRAYTLRLRGVDPQDQSWRDALWATHEAVNKGAKAFGDWLLTLRGGLDHALADAKVKGGKGKPDRDPTDEERKGRRILLALSWLSVESEKGAPEEYLVPHDLDKQSGTRSNWKTVDALREILRGRRLDESEIESWVRDCSASLSAAIRDDAVWVNRSKAFDDAVESVSSSLTRDEVWDMLERFFGSREAYLAPAKGAEDESAEVEQEDKAKDLVQKAGQWLSSRFGTGKGADFSRMATVYKEIANWAGKAQPGMTGDKAIADLAGALSEFSPTSNDLRGVLSLISGPGYKSATRNFLSQLATRTVVAESDLQSLQKSAKHDAQKCTANTGAKGQRPYSRVVLEQVESACGFTYLQDGGPARHSEFAVMLDHAARRVSLAHTWLKRAEAERRRFEEDAGRMGNVPASVKQWLDSFCADRSEASGALEPYRIRRRAVDGWKEVVAAWSKADCKTAEDRIAAARALQDDPEIQKFGDIQLFEVLADDEALCVWHKDGDSAKAPDPQPLIDYVLATDAEFKKRQFKVPAYRHPDALLHPVFCDFGNSRWDISFAVHEAGKSTVRKKKGQWQNSDPHALSMTLWTGSTVEPRRLRWQSKRLTRDLAFKEGKQNGNAPTVGRADRLGRAAAGVPEHGAVSIAGIFELEDWNGRLQAPRAQLNAIAARVARHDWDAKAKQMRDHLRWLITFSAKLQPSGPWLEYAAAFPDDAPAKPFVSRKGDYAVRHQGNDAREGHAKLILSRLPGLRVLSVDLGHRYAAACAVWETLSAKQVKAACQAAGHEPPKDSDVYLHLTKKVKKQKKGKEVEVEETTIYRRIGADTLPDGKPHPAPWARLDRQFLIKLQGEEEGAREASNQEIWAVHQMETVLGLSVPFIDRLIAAGWGCTEKQKSRLEELKKIGWTPAPKAESSGVQKENEEVDVCKPSLAVDELMSGAVRTVRLALQRHGRRARIAFNLTASKKLLSGGREEGLTDEGRVELLADTLADWYALFTGKGWTDEWARQQWETHVTPLLQGAALPKIPEDAEAAPKARKEYRADLTEHLKPVAETLAKDESLCARLHCLWATRWRENDVALRKRLRWLRDWILPRGRKAEADRAIRRVGGLSLTRIATIKSLYQVQKAFHMRPEPEDLRKNIPSKGDDALLDFGRSILDVMEHLREQRVKQLASRIAEAALGIGRMKRFAGGKDPKRPRERVDRPCHAVVIENLTHYRPDETRTRRENRQLMSWSSSKVKKYLAEACQLNGLHLREVSASYTSRQDSRTGAPGVRCQDVPVKEFMQSPFWRKQVAQAEKKQAKGKGDARERFLCDLNAKWKGRPEADWEKAGAVRVPLKGGEIFVSADEKSPAAKGLQADLNAAANIGLRALTDPDWPGKWWYVPCDPTNFKPAKDKVAGSPAICLDKPLKDTDGKAGARSREVVNLWRDVSSQPISANDDWREFTPYWNDAEARVVNILRQSAGLARDQGER

SEQ ID NO: 61830 - protein, 347 aa, Unknown
  Microbial source - Accession No. Ga0272448_1011735
METVKLCVKAVIPPRDIGLRRLMREYNVYKRVLIPRVKQTVRQVIKDKSITVYAQQKWMVDKKLNEYLKNLPFHPMPFHNQSVQLENKDGRFWIHFKTKEGETVCYLHVPAKYRDVIQKACGEDNPVLGQVELIEDRRYGWVNCHITLRLPKPEPYEPKGWIGVDVGWNKLATSIACTCNPHLKFFNPTFHGKEFKTRIIQLRHLLKQYAIKGKAWKKWNFRLQHTVKNAVGTVAKEIVSKAKRFKAGVAMENLTFKPVTKGYVVPRYKLMIAVKTLCEREGVPFKLVPAQYTSITCPKCSFKDEKNRDDEWFKCQKCGFQTDADLAGAMNIALKALTDAQMEGVMA

SEQ ID NO: 61831 - protein, 401 aa, Unknown
  Microbial source - Accession No. Ga0272448_1059621
MEEKLKLCVRAVIPPKDLGLRRLMREYSVYKKVLIPRVKQAVRQVVKDKNIAVYAQQKWMLDKKLNEYLKNLPFHPMPFHNQSVWLQNKDGRFWIHFKTKQGETVCYLHVPAKYHELIEKACGKDNPVLGQVELIEDQKYGWVNCHITLRLPKPKPYEPKGWVGVDVGWNKLATSIACTCNPHLRFFNPTFHGKEFKSQIIQLRHLLKEFQRKDKSVKKWENRLRNTIKYAVGVVAKETVSKAKKLKLGVAMEKLTFKSTTKGYLVPRYKLMVAIKTLCEREGIPFKLVPAQYTSITCPKCGFKDYRNRNGERFRCLKCGYQADADVVGAMNITQKAFDCSPDGGENDVGFTPASKADRGLPREAGHVASPQAPMNDDPYKARRKPNKIENEVRKEGLSRL

SEQ ID NO: 61832 - protein, 474 aa, Unknown
  Microbial source - Accession No. Ga0272448_1067731
MDKGEKELAEQPRHTKVLKLHILKPSGDMTWKELLELLREARYRVFRLANLAVSEAYLNFHQKRISPDFNSKRQTIGQLNRALREMLEQEGKKNNDRFSKNGALPDTVASALSRYRLHPLTSKKKWSEVLRGNISLPTFRRDMAIPVRCDKPGQKRLEKTNDGQVEVDLMICTHPYPRVVLATQDKSLGDGARTILAHLLENKDQSKNGYRQRYFEIKEDKLSHKWFLLVSYDFPASTPSLSKERIVGVDLGISCPLYVAINNGYARLGWRQFHALAARIRAIQNQTIRRRREILRGGNTIISDDRARSGHGLKRKLLPIEKLQGRIDRAYTTINHQFSSAVIKFAKDHGAGMIQIEKLDGLKEILSGTFLGERWRYSELQQFIKYKAKENGIEVKEVNPQYTSQRCSQCGYINEQFTFNYRQEQRQKLGKPVPFTCPECKYEANADYNAARNLATLDIEQLIMRQLDKQGIKN

SEQ ID NO: 61833 - protein, 401 aa, Unknown
  Microbial source - Accession No. Ga0272449_10022361
MASTVETDTIKLCVRATISPKDSGIRRLMREYTTYKKILIPRVQQAVRQVVKDRSITVYAQQKWMADKKINEYLKNLPFHPMPFHNQSVYIENKEGKFWVHFKTKVGEAVCYLHVPVKYHDLIEKACGDDYISNPVLGQVELIEDRKYGWINCHIVLRLPKPKPYEPKGWVGVDVGWNKLATSIACTNNPVKFFDPTFHGKEFKTRIIQLRRLLKEFQRKDKSVKKWEHRLQNTVKYAVGVTAKEIVAKAKKHKMGVAMESLTFRSVTKGYLVPRYKLMVAIRTLCEREGVPFKLVPAQFTSVTCPYCRHRDHENRDGERFKCLNCGYQADADLVGAMNVALTAAQMEGRLVWSLLPYLKGTAGLPAVQGDVATPLRGMSDDLYKATRKPEKIESEVSREG

SEQ ID NO: 61834 - protein, 427 aa, Unknown
  Microbial source - Accession No. Ga0272449_1004365
MRRVNVYRVIADRALLLLLRIIADRCARLWNTAQYICRQRFLAGEKVPSYARLCSLLKEHEAYRALPSDIAQEVLKMVRESWNSFFKNRKNYRAGKIPEPPGLPGYCKDRRTGHRLIRCIPIKCTRSYSIHGSEFSMTAPSDLSSDRLRMRVRGCTRWNGKPGRAELLWDAARNVWYLHQSVKVNAPTRRPRRRRWAAVDRGARIPLALAIEGVPEVLVFRARELWKDFLYWSRQIAGLQSRLRTRGMHASRELRRMYARRRERLLAAYRGLARTVVDILKRHGVTDLIVGDLTGIRENMDFGPLNELVHNFWSFAELLRILKDACERAGIRVHEKPEGGTSSHCVLCGEDAARPIRSRVLCRNGHELHADINGALNLLYREPEVRARVEGRPGWRTLRWNGHRWVPIESACRVPSPAATSRLPPGG

SEQ ID NO: 61835 - protein, 1399 aa, Unknown
  Microbial source - Accession No. Ga0272449_1006528
MSNKITNQKSIWSEFTKQYALNKTLRFELKPVGRTEDFLRQNKVFEKDKTIDDSYNQAKFYFDKLHQKFINESLSSNNARAIDLKYFAEKFLELKSEIQKLKSEKKQKEANNKEKEINNLRKAYYKEIKSLLDKKAEEWKEIYKKKEIKFSKTDLKQKGTDFLMKSGILGILKYEFPKEKEEEFKSKDWPSLFVEDKANPGNKVYIFDSFDDFTTYLLKFQETRKNLYKNDGTSTAVATRVISNFEKFLNNKKIFEDKYINYWKQVGITEEEKKIFEIDYYYSCFTQEGIDEYNKIIGQINQKTKQYRDKNKIEKSELPLFKVLDKQILGEVIKERELIAETETETEEEVFIKRFKEFIDQNKQRIPRVQNLMNDLINEKFESEYAGIYLKRSAINTIANRWFKNTTEFLLKLPQASKYKENKESPKVKSFVSLLDIKNALDEFEKERESLGAIFKDKYYKIKESDELPLDNDSQESYWKQFLKIWGYEFNQLFEDKFNEEGIKTFWGYTKDLEKEAENLNSFSRKKEEITVVKNYCDASLRIYQMMKYFALEAKKQEDIPSDFSTEFYNRFDEYYKDFEFVRYYNAIRNFVTKKPSNKDKIKINFESGELLRGWDISKIKGCLGIILIKNNEYYLGVVKKGKDKLFDYYENKNDTEKDIQRKNNLKKEIIAKPNEYYYIRVKYKQIADAGKDIYNLVLMPDGNVERFTDKEKKEKYWPEEIKRIKKEGSFKNNKRDLVKFIDYFKKCASIYWKEFNLEFKSSEEYENFKEFTDSINIQGYKISLDEENENKIKSEYIEKQVNEGNLYLFKIINKDFYKNKKQNSKKNIHTLYWEYLFSKDNLIKNEYPLIRLSGGAEIFYRKSFNIKKEPVVLKKDSIEKQVLRENKPIFHLNRYLEDKYLFHCPIKLNSLYTEVPNNEKQKRSFAAKYNKKLVEFLSKNVNEINIIGIDRGEKNLLYYTVINQQGEILDHGSLNEINGVNYLEKLIEREKERQINRQSWEPVVKIKDLKRGYLSYVVRKIADLVEKYNAIIVLEDLNMRFKQVRGGIERSIYQQFEKQLIDKLGYLVFKDDRDSDAPGGVLNGYQLVAPFTTFKDLGKQTGIIFYTNAEYTSKTDPITGYRKNIYNISNSASQKTIKENLINKLKALGWDEKEKSYFFTYNQKDFNSKDFNSPISKEWTLYSKVPRVRREKNNSTGYWEYKPIDLNKEFEDLFKKYEINEKSRDILSKIKELIKNNEEKLIQKQEFDGKNKNFYERFIYLFNLLLEARNTISLQVKLDKRGNEIKLDEIDYGVDFFASPVKPFFTTAGVRFVGKQIEGGKIQKEKKEEFAIKNFADFEKLFKGCSSDGFDSDGVGAYNIARKGIMILEKIKQNPKNPDLYILKEDWDDFAIKNALVK

SEQ ID NO: 61836 - protein, 359 aa, Unknown
  Microbial source - Accession No. Ga0272449_1019852
MKVSSQYRTVIVRLYPTEQQEKLLLKAEKEVLKFLETSRFELQKMLYHKIGEEVGISRRSLALLVQRFTGSLGEKAILPFDDNARFVNDNRIWFLEVQLFAGKGNRVRIPLAKTKVPYYSVLDELDGLPIVITRENSDWFAYVSIPVSQASNDLVVGVDFNYRKWLASPYEGKPLFFEVEDYATKIDRLQRMASRFQSRREEEKVREYHRLIRETVKLAHGNFLSRIRERFGVCTIAMEDVEKMYKMIEEIDSKTTNNWLNTKTALRQFILRAMAKGFEVVEVDPKDTSRTCHKCGNPVKIYGKHSRLVSCGFCDYRDYNRDLNAARNIARRGIELLSVMKGTCSITQILKTELHQLHQ

SEQ ID NO: 61837 - protein, 374 aa, Unknown
  Microbial source - Accession No. Ga0302046_10000852
MEVRKTYKYRLYRSKRDKHLAEQIELASEIWNHSVALSRRYYSLYRKHLGYYQLKRHLAKLKKRDKGRWYGLNSQAGQNVIERLRMSYQRFFSDPKAGRPGFKKRTKYPSFTLTQTGWKYLGGNRLRIGKHNFKFVLSRPLGGEVKTVTIKRDRCGDLWVCFSVVEDIQPSIPQTGSAVGVDFGLKEFLVESDGERVESPQHLRASLTEMARRGRDLSRKKKGSNNRRKARRRVAKLHRRIANQRRDFHFKTARTVLERHDFIAVEDLNLDGMKRLWGRKVFDLGFYQFVGILEHLAAMNGKRVVKVDRFFASSKTCHDCGWVKRDLTLADREWACEGCGSVHERDENAAKNIRDRALSHVVGDVRPAERAIAA

SEQ ID NO: 61838 - protein, 1088 aa, Unknown
  Microbial source - Accession No. Ga0302192_10026063
KVGGKGSRPYANAVLQDVEAASGITYHNACNGPSHHWQYAVILDHAARRVSMAHSWIKRAEEERSKFEIEKDKLQCVPSDARAWLDAYCARRSSESGAIDAYRIRRSAVDGWKQVVAEWAALLAKAKNAGSELPSEAESARIQAARELQDTIEKFGDIQLFEALSLPDAKCVWLTNGKPDAQPLMDYVAGTDAVSKKQRFKVPAYRHPDAFLHPVFCDFGNSRWSIDYAVHRAPEKLARAQQLLEKKKEELTRAEQALSKASDPSKRSSIEKKLKTLNVAFKQQEAEVLWLESHHAMTMGLWNGSRIEDTPLLWQSKRFGSDIGQAGAEHPLVASRADRFGRAVAMAKDNAPVVPSGLFDLADWNGRLQAPRRQLDAIAAIHDRTDLSVEEKRQLVAKRIRTIRWLVTFSAKLQSRGPFIAYAAQHGFDWRYGAHGIENKSREGLAKLVLCRLPGLRILSVDLGHRYAAACAVWETLSAAQMQNACLEAGMEAPSQRTLYLHLKHFVNGKEKKTIYRRIGAETLPDGSPHPASWARLDRQFLIKLQGEDRDARQATCDEVVAVEQLETELGYVRPIKRKGREHLVDELMSDALRTLRLGLQRHGARARIAFNLTATKRTRPGGIQELLDQESRIGLLTETLLEWNELYAGERWADELARDMWNKHIQPLLGGTILQETNNQDVTPSAAKRRMQREETREKLRPVAKQIAENDSLCRQLNVLWSTRWQIEDAAWRMRLRWMRRWLLPRGINRDPQFRKSIRDVGGLSLIRIASFKSLYQVQKAYWMRPHPDDLRRNIPERGDSSLTSFGQRVLDAMERMRENRVKQLASRIAEAALGIGDETSVNAKNGRRKRPTERSNDPRFAPCHAVVIEDLTHYRPDETQTRRENRQLMSWSSSKVKKYLGEACQLNGLYLREVPPAYTSRQDSRTGAPGLRCNDVAVPEFNSSRFWRKQVEAAEKNQKDGKKGDARERYLLSIDERIRSEANDRDVFRIPVKGGEIFVSACGQDGGSNANRKAPPGLQADLNAAANIGLRAIFDPDWEGRWWYIPCDATTICPVEKKFNGCKAVDSSKPLRIVAEKVAVSSSGID

SEQ ID NO: 61839 - protein, 1473 aa, Unknown
  Microbial source - Accession No. Ga0302246_1000265
MPQQAKPPVTQRAYTLRLRGAGPSDISWRKALWQTHEAVNKGAKAFGDWLLTLRGGLDHTLADAKVKGEKGNPDRDPTDEKRKARRILLALSWLSVESKLGAPAGFIIASGTEAAEDRNGKVVAALEEILKSRNLAENEIDEWKNDCSASLTAAIRDDAVWVNRSRAFDDAVESVGCSLTREEAWDMLERFFGSRDAYLAPAKVTEDESSEEEQEEKAKDLVQKAGQWLSSRFGTGKGADFSRMAAVYGKIAAWADNAQAGTTGNQAINKLAADLSEFTPASNDLQGVLGLISGPGYKSATRNLLNGLATKTTVTQQDFGSLRDKAADDAQKCKQNTGSKGQRPYSDAILKDVEAVCGFTYLQQDGGAARHSEFAVILDHAARRVSLAHTWIKRAEAERRRFEEDTQRLANVPGPVKAWLDSFCSERSATSGALEPYRIRRRAVDGWKEVVTAWSKSSCSTSADRIAAARALQDDPEIDKFGDIQLFEALAEDDAVCVWHKDGDAAKAPDPQSLIDYALAAEAEFKKRHFKVPAYRHPDALLHPIFCDFGKSRWDICFDVHKNVQTPFPRALCLTLWTGSGMVSVPLCWQSKRLARDLAIGSNATNAGYVEVARADRLGRAASNVTKSDEVKISGLFEQADWNGRLQAPRQQLEAIAVVRDNLSLSAQERERRMSSMKDRIRWLVTFSAKLQPQGPWCEFAKTNQLRIDPQYWPHADSNKTRKGQARLILSRLPGLRVLSVDLGHRYAAACAVWEAVNAEQVKKACQVAGHEAPKASDLYLHLKRKATKRKKGNQVVVEETTIYRRIGADTLPDGTQHPAPWARLDRQFLIKLQGEEEGVREASNEEVLKVYHLEAELGRTAPIIDRLVKAGWGQSGKQRTRLEALRELGWKPASEAVVSDGMGADEGEVRKPSLSVDELMSSAVRTMRLALKRHGDRARIAHYLITDEKTRPGGVKEKLNENGRIDLLQDALLMWHDLFSSRGWRDDVARQLWDNHVAKLSGYKAPEEIGEESSGPERKKRQKENREKLHDVAKALAQDVTLREALHDAWKKRWKDDDERWKKQLRWFKDWVLPRGKHASDPAIRKVGGLSLPRLATLTEFRRKVQVGFFTRLQPDGTRAETKEQFGQSALDALEHLREQRVKQLASRIAEAALGIGRMRRPMGGKDPKRPNGRVDEPCHAIVIEDLTHYRPEETRTRRENRQLMTWSSSKVKKYLAEACQLHGLHLREVSASYTSRQDSRTGAPGIRCQDVPVKEFMRLPFWRKQIAQTEKKQAEGKGDARERFLCYLNAKWKGKSEADWEKAGVIRVPVRGGEIFVSASRDSQGAKSLQADLNAAANIGLRALTDPDWPGKWWYVPCDPASFRPIKDKVEGSAAVKPDQALRQSAQAQSGDAAKDKKKRGNKSAGKSKEVINLWRNISSSPLECIEFGEWKEYAAYQNEVQCRVIRILEEQIKGRDKQLHEGAKEDDISF

SEQ ID NO: 61840 - protein, 1536 aa, Unknown
  Microbial source - Accession No. Ga030221_1001844
MPDQTNPPLTQRAYTLRLKGAQKDDTSWRCALWQTHEAVNKGARVFGDWLLTLRGGLDHTLADASLKSGQEKPDSTLTDEERKARRILLALSWLSVESKTGAPENFIVASGQDSEKNRADCVISALKEILESRKVDKNELDAWINDCSASLSSAIRDDAVWVNRSKAFDEAVKSIGPSLTREEVWDILGCFFGSREAYLAPGQSSDEDESSEAEQEDKAKDLVQKAGQWLSSRFGTGKGANFSHMSKVYEKISGWADSAQAEMTSKEAINDLAAALSEFAPASNDSAGVLALIKGPGYKSATRNLLSLIALQTTVTQEDLTKLKELAAKDKVECATKIGAKGHRAYSDKILEDVESACGFTYLQQSEEESARHSEFAVMLDHAARRVSLAHTWIKRAEAERKKFEKDSKKINCLPEAVRTWFDNFCIDRSELSGALEPYRIRRRAIDGWEKVVAEWSKPSCGNCADRITAARMLQDDPDIGKFGDIQLFEALAEDDALCVWHKNGNINEASDPQLLIDYAAATEADFKKRKFKVPAYRHPDALLHPVFCDFGNSRWDIDFSIKKAFNDLDKQKALLNKKEEEIIRAEQKLNIKNSKDVESQKKLQQEKEKLKKIQQKIAWLEEKNGVEMALLNNGKIGKMALRWQSKRLTRDLALDQSDNDCGVSHDVSRADRLGRAASNATGGKVNILEIFNQDYWNGRLQAPRQQLQDIAAVRDNPSLQAAERERRMSIMKDRIQWIVTFSAKLRPKGPWCEFAELNQLNIDPKYYPHAKENRGRKGMAKLILCRLPGLRILSVDLGHRYAAACAVWEAVSADDVKLSCACAGHEEPNERELYLHLKEKKSVEQKNGGKTETEQTIIYRRIASDTLPDGTPHPAPWARLERQFLIRLQGEDEIVREASNEEIFNVHRAEAELGRTVPLIDRLDKAGWGKSRKQKERLDGLRKLGWERVSDGTAQDVPDTGEDYWAKPSLSVDELMSSALRTLCIALKRHSDRARIASAMTAEYKTMPGGRKYYFTGPRELSASDDKSTIDNKHIEFIQDALVLWDGLMTSRGWRDDAAKQLWNNHIAKLSGYKAPEEISDESSKTERKNKQKENREKLRGAAAALVSDTNLREALHAAWKKIWEDDDELWKKRLRWFKDWILPRGKAAKDPAIRKVGGLSLARIATLTEFRRKVQVGFFTRLHPDGTKTEITEQFGQSALDALDRLREQRVKQLASRIAEAALGVGRVPRTKGGKTPKRPSARVDEPCHAIVIEDLSNYRPEETRTRRENRQLMSWSSSKVKKYLSEACQLYGLHLREVSAGYTSRQDSRTGAPGIRCQDVPLTEFILSPFWRKQVAQAEGKGDARDVLIRDLNHMLEDKSASDGEKPKVLRIPLKGGELFVSADKKSPASKGLQADLNAAANIGLRALTDPDWPGRWWYIPCEPGSFRPVKDRVEGSAAVDPNRALRQDAQPQGSDAAADKKKRAKKSTGKSQEKEIINLWRDISSSRPDDTAAGKWQTYDEYQNRVQYRVVDILREQANERKKRTSSRCDKP

SEQ ID NO: 61841 - protein, 1503 aa, Unknown
  Microbial source - Accession No. Ga0302253_1002416
MPQQDKPPVTQRAYTLRLRGTDPSDTSWRDVLWRTHEAVNKGAKEFGDWLLTLRGGLDHTLADTKVKGGKGKPDRDPTDEERKARRILLALSWLSVESKLGAPAGLIIASGKETTEDRNGRVVAALEEILKSRGAEDKIDEWKNDCSASLSAAIRDDAVWVNRSKAFDEAVKSVGCSLTREEVWDMLERFFGSRDAYLAPAKGSEDESSQTEQEDKAKDLVQKAGQWLSSRFGTGKGADFSRMAGVYQKIADWAGAHSPNNAGTGAIAGLASALSEFTPASNDLNGVLGLISGPGYKSATRNLLTQIDAKTTVTQADLTKLNETAAADKGKCETNTGSKGRRPYSDAILKDVESVCGLTYRVDENGNAVSVSNYSLYGDEYNWGSARHSEFAVILDHAARRVSLAHTWIKRAEAERSKFEEDAKKVDQVSKAAKDWLDKFCLERSGMSGALEPYRIRRRAVDGWKEVVAAWSKSSCSTSADRIATARALQDDPEIDKFGDIQLFEALAEDDAVCVWHKDGDAAKAPDPQPLIDYALAAEAEFKKRHFKVPAYRHPVALLHPIFCDFGKSRWDICFDVHKNVQTPFPRALCLTLWTGSEMKPVPLCWQSKRLACDLALGNNERNAGASAVTRADRLGRAASNVTKNDEVNIAGLFEQADWNGRLQAPRQQFEAIAAVRDNLSLSAKEREQRMSGMKDRIRWLVTFSARLQPQGPWCDFAETNQLRIDPQYWPHADANKTRKGQARLILSRLPGLRVLSVDLGHRYAAACAVWEALSAEKVKEACHAAGRKEPTENDLYLHLKKKVKKQKKAKAVEVEETTVYRRIGADTLLGGTQHPAPWARLDRQFLIKLQGEEEGVREASNEEVWKVYQLEAELGRTSPIIDRLVKAGWGQSNKQQTRLDALRELGWKPASGAGVSDGTDEDEAEVRKPSLSIDELMSSAVRTMRLALKRHGDRARIAFAMTAEYKPMPGDRKYYFTEAKELSANDDQATRDNKHIEFIQDALVLWHGLASSRGWRDDAAKQLWDDHVAKLSGYKAPEEIGEDASGVERKKKQKENRERLHDVAKALAEDTTLRKTLHDAWETRWEDDDEQWRKQLRWFKDWILPRGKAVDDPAIRKVGGLSLTRLATLTEFRRKVQVGFFTRLHPDGTRAETKEQFGQSALDALEHLREQRVKQLASRIAEAALGIGRMRRPMGGKDPKRPDVRIDEPCQAIVIEDLTHYRPEETRTRRENRQLMTWSSSKVKKYLAEACQLHGLHLREVSASYTSRQDSRTGTPGIRCQDVPVKEFMRSPFWRKQIAQAERKQAEGKGDSRERFLCDLNVMWKDKAVADWEKAGVARVPLKGGEIFVSADPASPAAKGLQADLNAAANIGLRALTDPDWPGKWWYVPCEPGSFSPVKDKVEGSAAVKPDQALRQPAPAQSSDAKDKKKRGKKGAGKSKEVVNLWRDISSSPLECIEFGEWKEYAAYQNEVQCRVVRVLEEEIKGRDKQPHDGAKEDDILF

SEQ ID NO: 61842 - protein, 1042 aa, Unknown
  Microbial source - Accession No. Ga0307340_100872
QQSEEESARHSEFAVMLDHAARRVSLAHTWIKRAEAERNKFEKDSKKINCLPEAVRTWFDNFCIDRSELSGALEPYRIRRRAIDGWEKVVAEWSKPSCGNCADRITAARMLQDDPDIGKFGDIQLFEALAEDDALCVWHKNGNINEASDPQLLIDYAAATEADFKKRKFKVPAYRHPDALLHPVFCDFGNSRWDIDFSIKKAFNDLDKQKALLNKKEEEIIRAKQKLNIKNSKDVESQKKLQQEKEKLKKIQQKIAWLEEKNGVEMALLNNGKIGKMALRWQSKRLTRDLALDQSDNDCGVSHDVSRADRLGRAASNATGGKVNILEIFNQDYWNGRLQAPRQQLQDIAAVRDNPSLQAAERERRMSIMKDRIQWIVTFSAKLRPKGPWCEFAELNQLNIDPKYYPHAKENRGRKGMAKLILCRLPGLRILSVDLGHRYAAACAVWEAVSADDVKLSCACAGHEEPNERELYLHLKEKKSVEQKNGGKTETEQTIIYRRIASDTLPDGTPHPAPWARLERQFLIRLQGEDEIVREASNEEIFNVHRAEAELGRTVPLIDRLDKAGWGKSRKQKERLDGLRKLGWERVSDGTAQDVPDTGEDYWAKPSLSVDELMSSALRTLCIALKRHSDRARIASAMTAEYKTMPGGRKYYFTGPRELSASDDKSTIDNKHIEFIQDALVLWHGLMTSRGWRDDVAKQLWNNHIAKLSGYKAPEEISDESSKTERKNKQKENREKLRGAAAALVSDTNLREALHAAWKKRWEEDDEMWRKRLRWFKDWILPRGKAAKDPAIRKVGGLSLARIATLTEFRRKVQVGFFTRLHPDGTKTEITEQFGQSALDALDRLREQRVKQLASRIAEAALGVGRVPRTKGGKTPKRPSARVDEPCHAIVIEDLTNYRPEETRTRRENRQLMSWSSSKVKKYLSEACQLYGLHLREVSAGYTSRQDSRTGAPGIRCQDVPLTEFILSPFWRKQVAQAEGKGDARDVLIRDLNHMLEDKSASDGEKPKVLRIPLKGGELFVSADKKSPASKGLQADLNAAAN

SEQ ID NO: 61843 - protein, 550 aa, Unknown
  Microbial source - Accession No. Ga0308310_1004946
LGDVLTKQTTRVIVPLVGFEARLLNIKSTHVAVHAKLEFLSNEDKREVLDLMRRFSSAYRWIYKRIVEGGNPAELKRAFGPMDKFGLNSRYKDSAVQLALVKLRTMESLGVNPKKVIFGSRRLFERLCRKGDLKSRAKAKRKWRERRKGVLKGLGSKADISGNVNLTPLLINGELWLRINIKTGTNPESGKKESRYVYAKVKTSHPYLSHILEVVGKRGAVPISVHLKLIDGKVYAIFTKKIDLPEPVLTKYYGVLGVDINARPLHLALAVVEPDGNLRKYTTISLEEVIRIRERYKGKSSNVLDNFYWLVAHQVVDLAKNEGVAIAIEDISNLPKGFRGDGNKKLRRILHRFAYRSILERIVRVASREGVEVWGVNPAYTSVIGMLKYAPMYSLSKDVAAAYVIGRRALGFSEKVPKRYLQLMASPEYRGSVINWFNQELSALEKRIGGERNEYKLNRLRKEKESLEKAFNWLNRFLSPGGSPEGLQRGLTYGRNPEEPKGDSLHLWKALQVGVLRPLLGQKVPRDLSVLKPLLVGGVWKCGKVEEGYT

SEQ ID NO: 61844 - protein, 552 aa, Unknown
  Microbial source - Accession No. Ga0308310_1013800
LGDVLTKETTRVIVPLVGFEAKLLNIKSTHVAVHAKLEFLSNEDKREVLDLMRRFSSAYRWIYNRLVEGGNPSEIIQVSGPVSRFGLNSYYYLSARELALYKISSLEAKGVNPRKIIFGTRTLFNRLCRKGSLKSRAEAKRVWRERRKGILLNFGNKKSVSGNYALTLSLINRELWLKINMGTSKNPKSGKKKSRYIYAKVKTSHPYLNHIMEVVGRSGIAPISVYLKLIDGKVYAIFTKKIDLPEPVLTRYYGVLGVDINARPLHLALAVVEPDGNLRKYTTISLEEVIRIRERYKEESSKVLDNFYWQVAHQVVDLAKNEGVAIAIENIFNLPKGFRGDGNKKLRRILGRFAYRSILERIVRVASREGVEVWGVNPAYTSVIGMLKYAPMHSLSKDVAAAYVIGRRALGFSEKVPKRYLQLMASPEYREAVINWFNQELRALEEKMGGERNEYKLNRLRREKESLEKAFNHLNRFLSLEGSPEGLQRGLTCGRNPEEPNKGDSLHLWKALQVGVLRPLLGQKVPRDLSVLKPLLIGGVWKGGGGLHLGPS

SEQ ID NO: 61845 - protein, 556 aa, Unknown
  Microbial source - Accession No. Ga0308411_10001123
MAFGRMAGPTIVYRYGAKKPTTNAEAMLEQLRKAHQYRNKLVELELQRRKLVEDAVKSIESEVRQMADKIEQLELDIDYVARKISSHKQKNRTRTVPTELKEQLKALKAQRRETLRQMREAKKAAYTRPETQEALSRIEGKARAEHKKARSLCGLYWGTYCHVEQIISQIRKGPPPKFRRFDGSGVLAVQLQKGEDIARLESGEDRRIRIEGYGKRRILWLRIGSDENHNPIWATIPFTYHREIPHNAKIKWVKVKAKRIACQIDWEVLFTLERSSGWKKPDLAQDGAVAIDIGWRNFDDRIRVAYWVGSDGFEGEIALPSNMVSKALEQVEHLRSLRDKNFNEIKQQLLDAIGALQIPEWLTEATKTLHQWRSQGRLASLTIRWRQQRFEGDNDIFNLLETWRVRDKHLYEWEAHLRMKAIRRRDDYFANVAADLSRRYKTAIVEDFDLRNVTQIDPTQTEQIGDGRQRYRARIAAAGNLRQMIKNRFAETQIVSAALTTQTCTECGEIMNFDAAESVFGKCPHCGHAFDQDRAAAINLMRRYEGKLVAASGEVR

SEQ ID NO: 61846 - protein, 1193 aa, Unknown
  Microbial source - Accession No. Ga0308411_10021369
DKNEVKMFNDIKARMRHHISKALTAHEGFSKLNKDDLFKKKKNANESLLENFLNQNEKVRNKLNELLRDNEGDRVDLFELLRAFENFTTYFRNFHENRQNLYSPEDKFSTIPHRLIHENLPRFCDNIKIYNQAKAAGLNMNDIEKELRLNNNSLDEIFSIKYFTKTLTQSGIDFYNYIIGGGAIQSGSQNIKGINNFINNDINQNVNNSSGRIPIMKTLYKLPLFERTSYSFRYEPIENDKDLIERIKNFYYEDLKNHRDVDDNENNQVNVISAIKSLIENIHDYREGLYVNGGITLTQISQKIFGSWHYIRDVLSEYYDKSIVPVKLDKKRTKAEEKAKEKWLKQKQFSVKIIEDALCAYKKEKETNEEIIKKITETTICDFFKLAGADDNGSNNLFERIESKLTIKNEYDESLADLLGKEFQNERNLMQDKPRTLLIKNFLDTLQGYKDDITAGLLHFIKSLLPSEEISDKNELFYSEFEKYYNILKEVTPLYNKVRNYLTQKPYSVEKVKLNFENNTLLAGWDENKEADNSCVLLRKNNNYYLGIMKKEFNNVFKKDKYLIANDNEPCYEKMIYKLLPGANKMLPKVFFADRNINEFNPSEEILRIRNTASFSKNGTPQEGFNKAQFNLEDCRKLIDFYKKCISNHCDWKNFNFQFSDTDSYQSIDEFYREVEQQGYKVNFVKIPDRYINQLVDEGQLFLFKIYNKDFSDKKKTNGKPNLHTLYWKMLFDENNLKNVRFKLNGEAEIFFRPKSINYTDEIWEKGHHYDKLKDKFNFPIISNKRYALDKFHFHVPITINFKSNNQENINEIVNNYLKNSDKYNIIGIDRGERNLLYVTVINLKGEIIEQFSLNEISTNYRDKCFSKDYHEELDKRESQRDRARKDWQTIEGIRNLKEGFLSHVIHKISQLVIKYNGVVVMEDLNFGFKRGRQKVEKQVYQNFEKMLINKLNYLVFKDKEPDEPGGVLNGYQLVNKFKTFKELGKQSGIVFYVPAAYTSSIDPLTGYVQYLFPIKHANSVEKARNFYSKFKSIYYNPEKEWFEFVFDYIDFNIRFEGKSDWKICTANTERYVWNKNLNSGRGGQEKINVTEGLKLLFREYNILYCDGKNLRELISEVRSINNENTDKKFYNRLNYLLNATLKLRHNNGKQGAEEKDYILSPVKPFFDSRSANKTLPKNADANGAYNIARKGL

SEQ ID NO: 61847 - protein, 1261 aa, Unknown
  Microbial source - Accession No. Ga0308414_1002480
MNFDEFTNLYSISKTLRFELKPVGKTLDWITKNKLVEEDEKRAEDYKTVKKIIDRYHKEFIEEAFESALNANSFQRDMKDLIESYSELYYKEDKSDKDKKELENISSQMRQEIVSCFEGNYSDEVKKKFSNLFKKELIKQDLLNFCQPSEKEVIEKFADFTTYFGGFHENRKNMYSSEEKSTAISHRIVHENLPRFLDNLKVFNSLKEEYQDFPWNQLEFNLKNIDPSLKLEDYFSKKGFILTFTQKGIDRYNLILGGKSLDSGQKVQGLNELINLYRQKKCLDRRKIPNLKELYKQILSDRVKFSFIPEKFLSDNSLLEAIRNFHEEVINAKIEIDSKQVNFLEALKNTIQGIKAHKLEKIYISNDLGLTNISNFLYGEWSKIKSALFYYYDEKIADKGKGDKQSKKYQEGREKWIKKDYYSVQKLNEAITLYSKYSEDGFEATPLEEYFSKFKTRDENRAELDILSNIEQSYSELKPLLEKEYLKNKNLKSDKYNIEKIKNYMDSIKILQNFLKPLTPKKILEEKDLGFYNEFETYVESLQSFNRLYNKVRNYLTEKEYSVEKFKLNFENSTLLNGWDENKESANLGIILRDEDKYYLGIMNKNYKKIFSNIPKLKSSEAYYEKMVYKLLPGANKMLPKVFFAKSNIGFFQPSQKILDIKNSESFKKGDNFNLKDCHELIDFYKESISKHEDWSKFNFHFSETSSYQDISEFFREVEAQGYKITFNQVSKDYIHSLVEYGKLYLFQIYSKDFSEKKKSNGKPNLHTIYFKALFDEENLKDVVVKLNGEAEVFYRKKSINYDPEIREKGHHYEELKDKFTYPIIKDKRYAEDKFHFHFPITLNFKPKERSNFNLEVRKFLKASKDVNIIGIDRGERHLLYLVMINQEGKILKQLSLNTIQNEKQAVNYKEILQKREIARNQARKSWRTVENIKELKEGYLSQVVHKISKMMVEHKAIVVLEDLNLGFKRGRQKVERQVYQKFEKMLIDKLNFLVLKDRKNNEPGGILKAYQLTDKFVSFENIGKQTGFLFYVPAWNTSKIDPKTGFVNFLHLKYENVQQAKDLIGKFDSIRYNKQKDWFEFQVTTDKFFTKENLPESRTWTICSTPTTRYYTEKTTNSSIVTNEINVNEKLKELLSEFHFEDGKELKEKILQKDTKDFFSKLIFYLRVLTSLRQNNGKIGDQEKDFILSPVADSKGNFFNSLEAKDDEPNDADANGAYHIALKGLMNLQVLKQTQEENLDKPNWKIKNTDWLHFVWNRQN

SEQ ID NO: 61848 - protein, 427 aa, Unknown
  Microbial source - Accession No. Ga0308414_1007395
MNQRILTKRETQQRHKQMICKSYELKIDKSHLSKELANHLRQLFLEAKWFTNYAIANGIFEVDYKIKTVQIKVKDTFEERQIKHLSSQMKQAIIDKLKQDVKNLSILKNNGHKVGKIKFKRFVKTIPLKQFGVTYAICDKNHVRIQGIGKKVRVRGIKQIPTGAEFSNAYLIQDHGDYYLRGITYQNPENTVPKENSKNNAVGIDFGLRNQITLSNGISIQYRIPVITKKLRRLYKKFTRTQKGSNNRLKLNFKIQKQFAKSNNIKKDIKNKIVHCIRENFSIVCFQNDDIRQWQRIWGSKILDTAIGKFKDILKKRIPISIAVDKTFPSTYLCSHCGTINEISLAEEIYKCPVCGFTMHRDLKAARDIFSEGLKQLLMEHREAALLYQGRYACGEETSTRMLEYLNSIPYIRASFLYETGSLTASA

SEQ ID NO: 61849 - protein, 1024 aa, Unknown
  Microbial source - Accession No. Ga0308414_1018540
MDKQVAATQRAYTLRLQGADPRDQSWREALWQTHEAVNKGARAFGDWLLTLRGGLDHTLADAKVKGRKGKPARDPTDEERRDRRILLALSWLSVESAPKDGDTHKPFVTATGQDSQAIREEKVLCALRGILEKRGVRGADLEGWIKDCTPSLSAAIRDDAVWVNRSEAFDKAVDSIGSSLTRDEVWDMLERFFGSRQAYLAPAEGAEDESAEAEQEDKAKDLVQKAGQWLSSRFGTGKGADFSRMAAVYEKIADWAGKARAGMTGDAAVAGLAAALSEFSPASNDLQGVLRLISGPGYKSATRNLLNKLRARPSVAQEDLENLRDSACDDAEKCKAKTGSKGQRAYADAILKEVESVCGFTYLQEGGPARHSEFAVMLDHAARRVSLAHTWIKRAEAERRRFEEDARRMDKLPARVKQWLDAFCFERSEASGAMEPYRIRRRAVDGWKELVAAWSNADCKTAEDRIAAARALQDDPEIEKFGDIQLFEALAHDEALCVWHKDGDLAKSPDPQPLIDYVLATDAEFKKRQFKVPAYRHPDALLHPVFCDFGNSRWDISFDVHEAVKTGGRNRKNMMPPQDPHALSMTLWTGSTVEPQRLRWQSKRLARDLALKGRQGSNAPEVTRADRLGRAAAGVPERATVSIAGVFEQEDWNGRLQAPRAQLDAIAARVARHGWDDKARQMRDHLRWLITFSAKLQPSGPWLDYAAAFPDDAPAKSFVSRKGGYAVRHQDNDAREGHAKLVLSRLPGLRVLSVDLGHRYAAACAVWETLSAEQLKAACRAAGQEPPKDSDLYLHLKKKVKKQKKGREVEVEETTIYRRIGADTLPDGKPHPAPWARLDRQFLIKLQGEDTEARKASPAELQAVQRVEKEVGRVPPDQRALRVDDLMSETVRTVRLALQRHGRRARIAFNLTAGTKLLPGGREEVLTAEERVRLLADTLADWYDLFTGNGWSDQWARQQWETHITPLLKGAALPQMPHDAEDIAKSLAGNESLRRQLHCLWATRWRDYDVTLQKCLRRLRDWIL

SEQ ID NO: 61850 - protein, 683 aa, Unknown
  Microbial source - Accession No. Ga0308415_1006042
MLTRARTRVKKITKTILKLELKGDPNSMKFLDNLFNEYEQLVRIADTFIYHLYPYYANINEQEKFEGLNKLIRSIERKAIIKRRKDKKRETDDDFVYQQLPYLFAWLEGKISKESRYIYSHSDLLKTLLYTFIKYAKQYYGIDVKYVLLEKQGGLADLMHSNAENAYKHRSIPNMRRRLINVIPIRVSKRPLPENRRNKDKRNDDKPYERDTAFIFENGKIMFRIGRGKHKVVFKIATRFNDDERLSMFIKAIKGNDGLTIGDPCYLVRKDTDNGYRYYIMVSISKNVDVKALYEAIKNKSKIRIVGIDSNISKYITTMFCIEVDKENKTYKLVNAKGINSKDYINAVKKYEEDKRKLQQGRMKGKKQKKKKDSRYKEKEDYTIRNRCGDSKRIDIRRQLIGYICNQILEFANENYADIIVIEDLKGLNKELKTLRIIKKELGKLYNDVNTKGNNAIDDKINESKKYKNKIRKPLLGILNKIKEYSNAKDKVKVAKYILKQRQIIERRIFLLSMMAYYQFKQELDVEALWNGKLLYIINPKYTSQQCLRCGHTNKLNRITQRQFKCIKCNFEMNADFNASANIALRFATKVLKLELNLKQVEQGESSSMMTITKTNATTPLHASINAGSKLGVVADTLSSVASILQGCDEGRSPYLGGQTDEPCSVKSIATLDEFLEKKGNGG

SEQ ID NO: 61851 - protein, 1229 aa, Unknown
  Microbial source - Accession No. Ga0308419_1006240
IRKDAVWVNRSKAFDNAVKSIPYFSREEIWDLLHRFFVSQKKYLAPLDSPTEDKPDTTKKNSSKRLIKSARNWLSNRFGTGKGADFERSAAVYEAISRWASEAKPNKTNVLIDDLAKALQKFGVKTRDIKGISNVLKKSGRKSKTRSLLLQLSAKPNIEDKDLQRLKDTAEKDSKKERSKIGVKGHRDYASEILKAVEAACGFTYLQEGDRAKHREFAVMLDHAARRVSSLHTWIKQAEAERRRFEIDTKKKDQLPASVKQWLDTYCQKRSEETGAVEPYRIRRGAIEGWKEIVEAWSKPAITTSEERIQEARRLQDNPEIDKFGDVKLFEDLAREDALPVWHANGDPDKPPDPQLLIDYVEASEAEFKKRAYKVPAYCHPDPFLHPVFCDYGCSRWNISFTIHKEKAPDDPHGLSLDVWDGRAIRSVALRWQSKRFVRDLALNPKRSSDKPKVTRADRFGRALAECPSSDEVCIRGLFEDEDWNGRLQAPRPELTALAKHVAKYGWDEKANKLRNRLNWFITFSAKLRPSGPWEEYTKYAGGKHASPNKRGTMAKLRLSRLPELRVLSVDLGHRYAAACAVWETLSKAAFEQEIRERQILRGGTGPNDLFCHTRHVTDGQAKVTIYRRIGADTLPDGTLHPAPWARLDRQFLIKLPGEEREARKASPTELAQVEKLEKGLGRKTPDNRVKRIDDLMSDTLRTVRLALQRHNRRAQIAFKLTTTKRHLPGGRVESLGEQDRVTLLCETLKMWHSLFMGDDWTDDWAKTLWDEHIVPLLPPFDNQKADDLKWLKPAAEELASNPTKTQELHILWASRWQEDEQLWKERLRWLRHWILPRGIQTSAQKASIRHVGGLSLTRLATIKTLYQVLKAYHMRPEPDNPRKNIPAEGDEALQNFGQKILDDLEHMREQRVKQLASRIVEAALGLGRMKRATNKRDPKRPRERVDQSCHAVVIEDLTHYRPEERQTRRENRQLMNWSANRVKKYLGEGCELHGLHLIKVPASYTSRQDSRTGAPGIRCQEVPLIDFLKEPFWCKKVKCAKQRLSVGKANACDRYLCQLYERWENTPVTKAQTAIRLQIPLKGGELFVSADQNSPASKGIQADLNAAANIGLRAITDPDWSGAWWYVPCEANTFKPVKNKVAGSAAIDPNVPLKKDSPNSEKPASGQKHLVQRSRASKSIINLWCDISSKSISERDQWQESVPYWEDVAVRVIKILQASLVCSTTNSQ

SEQ ID NO: 61852 - protein, 488 aa, Unknown
  Microbial source - Accession No. Ga0308419_1011938
LQKAFKNYHLLYDRLLKVIYNELSSFYSAIAYSTKNGEARCSDKKAVQYINSQYRNVLNSFVLSSGLKESLCKDLADNLISYKELLAQRPNTSYPSLQKLKERVKERTLEELYESLKACIDTETYNHLRDAIARQSKENAKLKPLSFIRCDTTHQNMTFLYSPDRKKYYALLYVLPSSKKKLVIIKEDELYDVRTGQLFSRPKGTTTGLIFPIETGQRIVERYLNEKSQPKEGKLVYDSKNNEYYLHLAFEFKPEKIPTETIIGIDRGIEAICAYSVINMNYNLLESGLYEGKTLKELLKSEEKRMAEMQRRGVNYRFKVRRNWANRIIHEATNMIADIASKYKSQVYVEDLQGITDRTKARRKSSFNKMLNRSQFQKILMTLDYKLEGKGLPRAKKVHPAYTSMTCVQCGLIKPENRPKFDENGNPIQDKFKCVGCGYEDNADKNASRAIALKGIWTYIKKEDKIRQEIESFQSFLNKKLNKKVIAL

SEQ ID NO: 61853 - protein, 1476 aa, Unknown
  Microbial source - Accession No. Ga031036_000087
MAKQVAVTQRAYTLRLRGVDTQDQSWREALWLTHEMVNKGAKVFGDWLLTLRGGLDHTLADTKGKDGKEKHGCNPTDEERKARRILLALSWLSVESRLGAPEKFIIASGQDAAEERNGKVVAALEEILNSRGVEPNEINAWKINCSASLSAAIRDDAVWVNRSKAFDDAVKSIGCPLPRDKAWDMLGRFFESEDAYLAPLEGSEDESSDTEQEDKAKDLVKKAGEWLSNRFGKGKGADFSRMADVYGKIAAWAGNAQAGTTGNNAINELATALSEFTPASNDLQGVLGLISGPGYKSKTRNLLTQLAQTPVVTQDNLKDLNKRAAADTKKCKEKIGSKGQQPYANAILKEVESVCGFTYLQNGGTARHCEFAVMLDHAARRVSLVHTWIKRAEAERRRFEKDLQMLGQVPSAVKEWLDKYCEERSNSSGALEPYRIRRRAVDGWEKVVAAWSKTGCKTPEDRITAARVLQDDPAIDKFGDIQLFEALAEDDAVCVWHKDGDPNREPDPQPLIDYVRATEANFKKQQFKVPAYRHPDAFLHPVFCDFGKSRWDIEFAIHEARKVKATKSALRRKNRQCFDSSRELFMTLWTGNEMKRVPMGWQSKRLARDLALGQNTPNDGAPEVPRADRLGRAASNVTKSNEVKIAGLFEEAEWNGRLQAPRRQLEAIARRVDKHQWDAKAKKMRDQLHWLITFSPKLRPTGPWFEYAATFPDNALAKPSVSRKGTFFVKYRDNERPRKGGLILSRLPGLRLLSVDLGHRYAAACAVWETLSKEKFEGEIKGRKVRYSDSETGGLFCHTEHGNNAVTIYRRIGADMLPDGTPHPAPWARLDRQFLIKLQGEEEETRAASNQEIWAVHQLEAELGRTSPIIDRLVKAGWGQSGQQRTRLDVLCKLGWKPISEDRVSDGTDEGEYEVRKPSLSVDELMFSAVRTMRLALKRHGDRARIAFAMTAEYKPMPGDRKYYFTEAKDLSTNDDQVAREHKQIEFIQDALVLWHGLFSSRGWQDDAARKLWDDHVAKLSGYNAPEEIREDASGVERKKKQKENREKLYSVAKALAGDATLRKALHDAWKTRWKEDDERWKRQIRWFKDWILPRGKASNDPAIRKVGGLSLTRLATLTEFRRKVQVGFFTRLHPDGTKAETKEHLGQSVLDTLEHLREQRVKQLASRIAEAALGIGSENRKKHWDGRKRARERIKDPRFIPCHAIVIENLTYYRPEETRTRRENRQLMSWSSSKVKKYLAEACQLHGLHLREVSAGYTSRQDSRTGAPGIRCQDVSIKEFMQLPFWRKEVARAEKKRAEGKGDARECFLCELNAQWKDKSKAAWGEAGIVRIPLKGGEIFVSADKNSPAAKGLQADLNAAANIGLKALADPDWPGKWWFVPCNSTTFEPLKDKVGGFAAIRLNESLKKAPASWEGEETKKKRSRDVVNLWRDVSSQPISASDDWREFTPYWNGVQTRVVNILRQSAGPIMNHGER

SEQ ID NO: 61854 - protein, 457 aa, Unknown
  Microbial source - Accession No. Ga031038_009337
MAKRKRDKNAVVKTLKLELVDVLNYEPPPKKDGEEYTEKEKKRMFRKELRNLQKRIAQTSNYIMREYFLWELKRIEASKNGIILNEKEELGTTLQNKGYRIATETLKGLNTRNISALTSWLWENWRKYKKKVFNGSMSLPSYGLKQPIHIIKENYKIMPYKNNNEYIVEITFLSPSEGRNRTLKFVTVRQDKYRQNIINKILSGEYRQGSAQLILENNPNKNLSAQKIFFHFNYEFVPQVKEELSDKILGLDLGLKNVVVMQVYDPQQGKFEDLDENECMIDGTELVIYKNKIEALRKKANKATKWKGQGNTGHGRKKRTKNALNIGHKIKNSKSTYNYKLAKYIIDFALKYQCKYIKMEKLTRHGFSDTLLQNWAFNDLQNKIKNKAKENGIEVLFVEPQYTSQQCSKCGYIDKENRETRDNFKCKKCGFEIDADINAARNIALSEKIIKEDDDDE

SEQ ID NO: 61855 - protein, 457 aa, Unknown
  Microbial source - Accession No. Ga031046_00181
MAKRKKEKRTIIKTLKLELVDVLNYQPPISTDEKEYTKKEKERMLKKELRDLQKRIAQTSNYIMREYFLWELRKNAASKNGIVLNEKEELGTTLQNKGYRIAAETLKGLNTSNISALTSWLWENWKKARKRVLNGSISLPSYGNKQPIHINGKNYKIIAYKNNNEYIIEITFLSPSEKRNRTLKFVTAKQDKYHQDIMNKILNGEYRQGSAQLILEDNPNKNLSAQKIFFHFNYEFIPKQKEEISDRILGIDLGLKNVIAMQVYDPQHQQFISLDNNECVIDGLELVIYRNKIEALRNKISKATKWKGKGNVGHGYKKRNKNVLNIRKKISNFRKTYNYKLAKYIIDFALKYQCKYIKMEKLTRHGFSDTLLQNWTFNDLQNKIKNKAKENGIEVLFVEPQYTSQQCSKCGYIDKENRETRDNFKCKKCGFEIDADINAARNIALSEKIIKEDDDDE

SEQ ID NO: 61856 - protein, 672 aa, Unknown
  Microbial source - Accession No. Ga0310828_1006812
KHGFSYYHKGINYELKGTLGGARIQFDRDHLLRRQGVKAGNVGRIFLNVTLNIEPMQPFSRSGNLQTSVGKALKVYVDGYPKVVNFKPKELTEHIKESEKNTLTLGVESLPTGLRVMSVDLGQRQAAAISIFEVVSEKPDDNKLFYPVKDTDLFAVHRTSFNIKLPGEKRTERRMLEQQKRDQAIRDLSRKLKFLKNVLNMQKLEKTDEREKRVNRWIKDREREEENPVYVQEFEMIRKVLYSPHSVWVDQLKSIHRKLEEQLGKEISKWRQSISQGRQGVYGISLRNIEDIEKTRRLLFRWSMRPDNPGEVKQLQPGERFAIDQQNHLNHLKDDRIKKLANQIVMTALGYRYDGKRKKWIAKHPACQLVLFEDLSRYAFYDERSRLENRNLMRWSRREIPKQVAQIGGLYGLLVGEVGAQYSSRFHAKSGAPGIRCRVVKEHELYITEGDQKVRNQKFLDSLVENNIIEPDDARRLEPGDLIRDQGGDKFATLDERGELVITHADINAAQNLQKRFWTRTHGLYRISCESREIKDAVVLVPSDKDQKEKMENLFGIGYLQPFKQENDVYKWVKGEKIKGKKTSSQSDDKELVSEILQEASVMADELKGNRKTLFRDPSGYVFPKDRWYTGGRYFGTLEHLLKRKLAERRLSDGGSFKRGLSNGTDSDSNVE

SEQ ID NO: 61857 - protein, 1215 aa, Unknown
  Microbial source - Accession No. Ga0311022_13670299
VLLVYTGGQGLPLHAGNRKLCFEKFHNQEIASLAAMSFKGAVLHVSSENRKEMDMTQQNRPSVTQRAYTLRLYGANSEDASWRKALWLTHEAVNNGAKTFGDWLLTLRGGLDHTLADAKVKGAKGKPDRDPSIEERKKRRILLALSWLSVESKRGAPAAYIIATGREITENRNSKVVAAFEEILKSRGLTDTEIAEWRSDCTASLSATIRDDAVWVNRSKAFDDAAKSVGRSLTREQLWDMLDPFFGSRDAYLAPTKSSEDDSLEEEQGEKAKDLVQKAGKWLSSRFGTGEGADFSRIADVYEKITAWADAFQVGKTTTGDEAIKNLAAALSEFKPVSNDLTGVLRLISGPGYKSATRNHLNSLFGKKRINQEDIQILKTKAANDAQQCRQNTGSKGYRPYANAILKDVEDACGFTYRTDKDNKDVSVSDYSKFEDGYRWGPARHSEFAVMLDHAARRVSLAHTWIKRAEVERRRFEDDALKREQVPENVKKWLDDFCWKRSEASGALESYRIRRRAVDGWKNIVGAWSKAECRTMEDRITAARALQDDPDIEKFGDIQLFEALAEDDAVCVWYKDGDPAKEPEPQNLIDYALAAEADYKKRQFKVPAYRHPDALLHPVFCDFGESRWDISFSVHQQERNKSKLNNKKMITQGSPLRGLSLTLLTNIGIKPVLLCWQSKRLARDLALVSNADKGHVVNVSRADRLGRAASAVTENDTVAIESIFEEKKWNGRLQAPRRQLEAIAAVQNNSRFSAEERARRIQRMRERIRWVVTFSARLQPQGPWCEYAEKHRFKPDPRYWPHAEINKNRKGYARLILSRLPGLRVLSVDLGHRYAAACVVWEAVDAAHIKEACRAAGRESPNESDLYLHLKTKGQDGKERITIYRRIGADALPGNTPHPASWARLDRQFLIKLQGEEEGAREASNEEIWAVHRLESGLGRVAPLIDKLIAAGWGGTDKQKARLEALKQLGWSDRTAAASAGAGAEADEESGGIVPSLAVDELMSSAVRTMRLGLKRHGDRARIAFYLVTEEKTMPGGVKNKLDEQGKIDLITDALILWHDLFSSRGWCDDAAKKLWDDYIAKLSVYRALEEGDKDDSGSERRKQKDENRRKLYNVAEALLQDTDLQQRLHNAWKKRWEEDDEWWKRQLRWFRDWLLPRGKHTRAPGIRKAGGLSLIRIATLTEFRRKVQVGFFTRLRPDGTREEIKEQFGQSTLD

SEQ ID NO: 61858 - protein, 347 aa, Unknown
  Microbial source - Accession No. Ga0315269_0011078
METIKICVRGVISPRDMGLRKLMREYDVYKKVLIPRVKQTVRGIIKDKSLAVYSQQKWMIDKKLNEYLKNLSFHPMPFHNQSVYIESKDGKFWIHFRTKQGNVVCHLQVPMKYKSLIEKACGEDFADNPILGQVELIDDKKYGWINCHITLRLPKPEPYEPKGWIGVDIGWNKLATSILATKNPHLCFSSPIFHGKEFKTRIIQLRRLIKEYSRKGKSWKKWNFRLKNTIKYAVGVVAKEIVFKAKKFNAGISMEKLTFKSTTKGYLVPRYKLMIAIKTLSEREGVPFKLVSPQYTSITCPKCNYKDEKNRDKQWFKCQKCGYQTDADLVGAMNIALRALTASQMEG

SEQ ID NO: 61859 - protein, 371 aa, Unknown
  Microbial source - Accession No. Ga0315269_0014929
VARVETAYRTVILRLYPTPKQARMLKRAEAEVFKFLEVSRYQLMKLIYHKAGEAGVGVGRYSLSLLAQRFTGSLGNKAIIPLNTAYNARFIRENGVWFLEAQLLKGRGNRVKIPVAKTENKYYAAIGELGDLPLYVTREDDKWFAYVSIPVNAENNGRVIGVDFNLRKWVAAPAEGGPVLFFDASWYCREIDRLQRMRARLQSKGDLEGVQAACKGMVDAVTLAHGNFLARIQEKFGVCVIGMESVETLYKLTEKDNTMINNWLYSKTALRQFALRAMGKGFEVVEVDPRYTTRTCHRCGAPVKINGRRGRSITCPSCGLTNYHRDLNAARNIAKKAAEEWSKRVESRRRMEKLQPIAVAANGGGEEAAEK

SEQ ID NO: 61860 - protein, 439 aa, Unknown
  Microbial source - Accession No. Ga0315269_0030078
MENTIKMCVKAVIPPRDAGLRKLMHEYSVYKRILIPKVQRAVRQVVKDKSIAVYAQQKWMMDKKVNEYLKNLPFHPMPFHNQSFYIEDKDGKFWIHFKTKQGEAVCYLRVPARDHDLIEEACGNDYASNPILGQAELIEDRRFGWVKCHITLRLPKPEPYTPKGWVGVDIGWNKLATSILATTNPHIRFIKPAVHGKDFKTRIIQLKHLLKQYARRGNAWKKWDYRLKDSIKYAVGVVAKEIVAKAKKHKAGVAMEKLTFKSTTKGYLVPRYKLMMAVKTLCERSGVPFKLVSPKNTSLLCPKCENKQSRSWAEENGKDEKEQRKLFQTRIRKNREKARFRCIDCGYQADADIVGAMNIAQKALDSFPYEGENDVGFTPTSKADRGLPRKAGHVASPQAPMTDDPYKARRKPNKIENEVRNRLKWALNGHRTDLTQRLQ

SEQ ID NO: 61861 - protein, 796 aa, Unknown
  Microbial source - Accession No. Ga0315277_10001015
MATKSFEARVLCRDDPPDKKGEKYSAEQKKQFLWYTHQVFNESIRKVLPYVFKMKRGELGDEFQAIYYAISSSQDAVGKLEAITSLDWSSKKIGKSEPEKWKEILRYRELEKEFRQKLKDEEKNTKKFRKELQKKKKALANEIGQKDIWADAASIIQQKNNLLFDREKILPNLPSEFRRKIFEMCIQLIHGHQELVANWQDEHAEWLQEKDKFEEEHPDYMKVRPILEEFEKEAGKVKGSRIRWLKYLDYMSSHPELAGWRGGEAKVEPLTSAERAKFRKPREHFEAFFKKNPELSALDSIHKQYQEKFARTQTKRTPNPDGFKHRPTFTLPSANLHPAWYSFKGATDPTKGATYKLNFREDRRVDSFMNLKVLTDMEGEGRNPKGMITYDFEPDDRIRDFRYIGTTEKGKKAKGFVYYDKILEKERPAKIQGIKLVFRPPRSDGVPYLIFSCSIEDEKSKIKIWQDKESEEGPDEARKGKKAKKIYPPELVTLAIDFGQRHLGAITICKNNNGKPEQIKFIPAYPKRKQGKQTKPVSAWLAKVPGLTFNAIGMHEKEIRAGMHQRFQDPKSIRQAGEKEGRASKPRHIPETETSFAHLRDHIAGMKEDHYKKAANLIIKTALQNGAQVILLEDLKKYRPMLEKESRENRRRMQWAVRQTAEFLKKTAKPLGLLIYDRINPAYTSSMCSVCGNPGARISLPSKRNWEKYYAEYYGKERRMIAVVGGQFFCCPVCKKIINADINASQNMHKVFYNTFNWPPKMEKKEKKIFWESVREQAQNILDQKAEPKREEDISY

SEQ ID NO: 61862 - protein, 478 aa, Unknown
  Microbial source - Accession No. Ga0315280_10009663
MEDLRMAKKTENRHIKVLKLRILKPAGEMTWADLGEILREARYRVFRLANLGVSEAYLNYHLWRSKRASDFKIRTMGELNRELRETLRNEGKNEDQLNRFSKTGALPATVTDALSQYKLRAVTKKSKWKEVINGKSSLPTFRLDMAIPVRCDKKDQRRLEKTASNEVELDLMISARPYPRVVLATQEGSLGEGARAILEKLLENENQSKAGYCQRCFEIKQDTLSRKWFLFITYDFPATEVLSSKDRIVGVDLGVSCPVYVAINNGYARLGRRQFNPLMARLRALQNQTIRRRREIQRGGNEIISEERARSGHGRKRKLMPIEKLQGRIDRAYTTLNHQMSAAVIKFAKNNGSGVIQMENLDGLKEELTGTYLGERWRYAELQHFIGYKAKEAGIEVRKIDPKYTSRRCSECGYIYIEFNRAFRNTEHEKGKAAKFRCPVCNYEADADYNAARNIATLDIENIIKLQLEKQRVNPGDH

SEQ ID NO: 61863 - protein, 383 aa, Unknown
  Microbial source - Accession No. Ga0315280_10032046
MENTLKLCVKAVISPRDMGLRTLQKEYANYKKVLIPKVQKAVRQVAKDRSIKVYAQQKWMLDRKITEYVKNLPFHPMTFHNQSVWLERMEKGHFRIHFKTKQEEKEAVCYLQVPSKYRDQIEKTCGKDNPVLGQVELIEDRKYGWINVHITLRLPKPESYEPKGWVGVDVGWNKLATSILTTVNPHLHFANPTVHGKDFKTRIIQLKYLLKQYARKGRSWKKWDFRLKQSVKYAVGTVAKEIVGKAEKHKAGISMENLTFQSQTKRWLIPRYKLMIAIKTLCERKGIPFKLVPPRNTSITCPKCGFADSGNRNGERFNCRKCGYKADADISAAMNIAAIAIGFMPLAKEVRLHAKTSGDVATPLSTDEPMTSIKAGANPTESK

SEQ ID NO: 61864 - protein, 446 aa, Unknown
  Microbial source - Accession No. Ga031528_10053614
METIKFCVKGIISPKDKALQILQKELKNYKNALIPKIQNAVRKVVKDRVFQVYAQQKWMLDKKITGYIKNLPFHPMTFHNQSVRLEKTEEGQFYIHFKTRQEEKEAVCHLQIPMKYRSQVEKACGEDNPVLGQVELIEDNKYGWINVHITLRLPKPEPYEPKGWIGVDVGFCKLATSILAVPYVEARSIGHISSPLKGVTESPSSEALSSIAFNQQHKADGNTPNQGYKNRLNTIIIKFSNPTIHGKDYKTRIIQLKYLLKDYARKGKGWKKWNFRLKQTVKYAVGTVAKEIIAKAEKHKAGVAMENLTFQSQTKRWLIPRYKLMVAIKTYCERKGIPFKTVPPRNTSITCPKCRYVDAENRDGERFTCRRCGYQADADISAAMNIAHLAIYEEVEHLNSRKSAIAIGFTPMVKEARLHAETSGDVATPLSTNEPMTFIRTGANPV

SEQ ID NO: 61865 - protein, 389 aa, Unknown
  Microbial source - Accession No. Ga0315282_10053614
VETIKFCVKAVISPKDKALQILQKELKNYKKMLIPKVQKAVRKVAKDRSINVYAQQKWMLDKKLTEYLKNLPFHPMTFHNQSVWLERTEKGYFLIHFKTKQEEKEAVCHLQVPSKYHSQIEKACGKDNPILGQVELIEDNKYGWINVHITLRLPKPEPYTPKGWVGVDVGWNKLAASILVTANPHLHFSNPTVHGKDFKTRIIQLKYLLKQYARKGRSWKKWDFRLKQTVKYAVGTVAKEITVKAEKHKAGVALENLTFQSQTKRWLIPRYKLMVAVKTLCERKGIPFKLVPPRNTSITCPKCGYIDAKNRNGERFNCKKCGYQADADITAAENIAAIAIGFMPVVKEVRLHAEASGDVATPLNTDETDDLIKGRCKPSKIENEVTVKG

SEQ ID NO: 61866 - protein, 488 aa, Unknown
  Microbial source - Accession No. Ga0315285_10079970
VSVLLTAKLKVHNPSARKRQILDRALEEYTRAYAELLQWAKDNLSTIEEKGRYNGRFTETAIRSVFPNPSAFNHYYLHSSARDALWVDVAGTLCSYFRLREQNPSTAFPSCRDPSPETYPNALDDFAAVLDDEQQEKDCRARLLKVARGSVMPMYFSRPDAVPRNRNFSLLHDPQRQRYYALLYLEPGANNSDGCLRGKGNLVRVGWPQGKNAGDPRPAFRARAPCAVLLPLALGDWHVETFLNTSLRGDANVRSAFLSRRERGGREPEYYVHITFEFSPERVQTETALGVDRGLANLIALTVTDEAGKILHQELHPGRDLIDYQKYVYTVYRSRQKRGRSVAGQAMVARVNEEVCHRLANVIVETAVEHKSQVVMEDLKWFKERRRDFGQLKRAPLQRIQQILEYKLPMRGLPRPWYVGSAYTSRECPLCGYGFQVKGRGINRPSQDRFKCERCGYQTHADLNGSHNVARRWLQRKAERARPSTLTA

SEQ ID NO: 61867 - protein, 473 aa, Unknown
  Microbial source - Accession No. Ga0315288_10142264
MTEKEIAKRHVKVLKLHILKPADGMTWPELGKILKEARYRVFRLANLAVSEYYLGFHLWRAKKTEQFSTRTIGELNRELREMLKEGKSAEELDLFSKTGALPDYVAGALSQYKLRAVTSKSKWKEVINGKAALPTFRLDMSIPVRCDKPNQRRLERAANDDVQVALMVCSKPYPKVVIATGEPSLGGGPREVLKRLLENKSQSKDGYCQRCFEIKQDRLSGKWFLFVTYDFPVTQIAVSKERVVGVDLGVSCPIYVAINNGHARLGYKQFSSLMARLRALQIQTITRRREIQRGGKTIVSDDRARSGHGRRRKLLPIEKLEGRIDRAYTTINHQLSAAVIKFAKNNGSGVIQIEDLKGLGQELSGTYLGERWRYAELERFIEYKAKEAGVEVRRVQPQYTSRRCSECGNINMEFTYEFRKAEKEKGNRLKFKCPKCNYEADPDYNAARNIATIDIESIIRLQLDKQDHQDVDL

SEQ ID NO: 61868 - protein, 636 aa, Unknown
  Microbial Source - Accession No. Ga0315298_1000517
MDGLRGQRTRLRVGSWRRSWDLRDVPDERKRTVHRTAHRLTIRAETAIRDDHACTKASYLRPTMGMKRREGESMFGNPSEPSCVYRYGAYAPTTNIEIVHEQMRIGSRYRNKLCEIELARRAERDAFLQEASGEVNAAEKALADICAEIDKIKTEIAEYRKRARKRKLPPELSARRKELFAARKAARQRRNAAKKAAYKSSEFKEGLHKIDVAAIEKIKQARAESGLYWGTYSHVEQSMKGTQKGPPPKFKSYRNGEGTIAVQVQHGLTVREAESCKDTRIRIEGTGRKRILHIRVGSNGRKPIWATVPFVYHRPLPEDALIKWVRVTSRRVACHFHWYVLFTVSRPSGWKKADLAPDGVVAMDIGWRLFRDRFRVAYWVGSDGQEGEICLPLEYLDRRDKKNDLRKIRDEKFNAIRDKLADWIEAKTDALPQWLKEDTTSLRQWKSQARLAGLVLRWSRQRFTGDEEIFPELEDWRSDDRHLYEWEVNQERKAIAWRNEQYRIIAAELSRRYRKAVIEDINLHELSDSEKATDSANNATRDGKVGDGKQAWRRMVASVGRLKQFIKERFDSTVEVKCEWTTQDCAYCGERMNVDAAHNVVIKCPSCGVEIDQDRNAALNLLKRAGVPLESILVCS

SEQ ID NO: 61869 - protein, 583 aa, Unknown
  Microbial source - Accession No. Ga0315298_1001941
MQEQIKTFFCEKCNKEKKIPRNLLGKADAVEKARERHYHKEHTLILGIKFKIYPEKKDLEKINEYFDEYAKAVNFAARLIDKLKGQFLFMGKRNKEDEERKYIFPIARCDFCGEEKEISYQNKRGKKICFSCYQNEFGENGIRKKLYATKGRKVNASYNIKNATNKLCATHYNYVIRDAFQLLDALKKQREKRISRLIRDKGKLKKFEEMLEQEDKRYELPKKERQREPRFIHISLKDRAQEFEGRGYTIKRIKEKIKVLRRNIEREEKSLNKKTPIEFSGKRITLSSSLKFNIEKSLVRIPLTKELTKDYKFGGMNVANEHGRKFFEEKLKLIKENKPKYSYLIRKQINKDPDKPFYDYYLQYTVEFLPEVKQNYKRVIGIDRGIDHLACLVLLENGKEKPSFVKFFSGKDILKLRNQRRKQLSFLIGVHNKKRKQKKIRPIEPKIHQILHTISKQIVMLSKQKEAAISLEQLEKPKKGKYKQSKSTKYKLGQFVFKALSDYIEYKAKKEGIRVIYVPPEMTSQICSHCAIKGKVHVDTKRPYKNSYKLFKCNKDGCGVELNADYNAAFNIAQKGLKILNSK

SEQ ID NO: 61870 - protein, 1470 aa, Unknown
  Microbial source - Accession No. Ga0315298_1005332
MPKQNKPPVTQRAYTLRLRGTDLNDQSWRDALWKTHEAINKGAKAFGDRLLTLRGGLDHSLVDTKVKGGKGNPDRDPTDEERKTRRILLALSWLSVESKLGAPENFIVASGEESAQDRNNKVIAALEEILKSRGVAENEIDQWKKDCSASLSAAIREDAVWVNRSKAFDCICGNEDKKKAREDAQTLLWFLLTDDYLAIPKKPVKASETTVLDDKKEETGDDSSGELIVKSGKGAGKRTRHPFSHIFGRETTKGFGNPLRTFNLRNFWRQYLKPKIEAAGIPLSDPNAKAKKKDPPSPTELHREMFSQAAARLAQIWTKQKQQELERVQRAAADDELKKLENDPAYNTVLKRLEMFCRERGQATGSLEEYRINPRAIEGWDRVVTAWENISETDNDRATEKRIEKAKDLKKDNPDKKFGDINLFIHLAEPEYEPVWRHNGQADPSILKTYVKGWKARTDAIRLKVAAFRHPDPYFHPVFCHFGVSRPPIKHNRLNKRSVDDTRIVQMLLWTECKAEYVQLLAISKRFDAEIGSAAESSRDASANVPEVARRSRLGVAAITKQGGGDTFCVANVFDQQEVRPRKGEDKDGTQEEGCNNESQDRKKKEPTWNGTLQADRLKLEAIGRLQSSEPQKALLAKQHLRWWLIVSLELQPTGPWYDYITVLSDKSPFLRTARKDEDKGEKRKQGAKYISWSGWPHDEVNKPLRKNKNGTGLEADPTSHRQSMAALILSRLPGLRVLSVDLGHRYAAACAVWEALSAEAFKKDIDGKKILRGGTDEKDLYCHTEHEADGKKHVTIYRRIGADKLPDGTPHPAPWARLDRQFLIKLQGEEEGVRQASNEEIWQVHQLEAALGRSKPLINRLISSGWGITKNQQSRIEALKKLGWCPPEQPESGDVSDADEEEIAYKPPLSVDELMSSAVRTMRLALKRHGDRARIAHYLITDEKTKPGGVKEKLDANGRTEMLQDALVLWHDLFSSRSWRDDAAKQLWDEHIIKLTGDKLPEEIGEDASESERGKKKKENREKLHDAAKALAQDESLRKTLHDLWKTRWEEDDRQWKKHLRWFSDWVLPRGKAAEDPAIRKVGGLSLTRLATLTEFRRKVQVGFFTRLHPDGTRAETKEQFGQSTLDALERMREQRVKQLASRIAEAALGIGSQDKRHWEGGNRPRRRINDPRFAPCHAVVIEDLTHYRPEETRTRRENRQLMTWSSSKVKKYLAEACQLYGLHFREIFAGYTSVQDSRTGAPGIRCQDVPVKEFMRSPFWRKQVKQAETKLLENKGDARERFLCSLNAMWKDKAVTDWERAGVVRLPLKGGEVFVSADPLSPAARGLQADLNAAANIGLRALTDSDWPGKWWYVPCESSSLRPVKEKVEGSAAVNPTQALPQSAQKQNDGAGAKKKRKGSGTGKPKEVVNLWRDVSSSPLDDPNAGEWKEYTAYQNEVQWRVVRILEEELKGRFQRLYEGAKEDGIPF

SEQ ID NO: 61871 - protein, 1362 aa, Unknown
  Microbial source - Accession No. Ga0315298_1007399
MTNNIKNQKSIWSEFIKQYALNKTLRFELKPVGRTEDFLKQNKVFEKDKTIDDSYNQAKFYFDKLHQKFINEALFSESVKSINLKDFAEKFLGLKSEIQKLKSEKKQEEANKKEKEVNDIRNDYYKKIKSLLDKKAEEWKKKYKDGGLKFRKTDLKQKGTDFLMKSGILGILKYEFPKEKEEEFKNKDWPSLFVEDKANPGNKVYIFDSFNATYLLKFQETRKNLYKDDGTSTAVATRVISNFEKFLNNRKIFEDKYINHWKEVGITEEEKKIFEIDYYYNCFIQEGINKYNDLIGQINQKTKQYRDKNKIEKSELPLFKVLDKQLLGEVIKERELITKTENETEEDVFVKRFKEFVDRNKQIIPRAENLMNDLINEKFESDYYGIYLKRAAINTIANRWFKNTTEFLLKLPQASKSKENKESPKVKPFISLLDIKNALDDFEKEKESLGTIFKDKYYKTKESDEAPLNNDSQESYWKQFLKIWNYEFNQLFEDKFKEKGIKVFLGYTEALKKQVENLKSFSRKKEEIVLVKNYCDAALRIYQMMKYFALEAKKQDDIPLDYATEFYNRFDEYYKDFKFIRYYDAIRNFVTKKPSNEDKIKLNFESGSLLTGFDKNKESEKLGVILRNRNSDKYFLGIINKEHNKIFDSKNESKFIGDDNKDLYEKMELKLFPDPKRMIPKIAFADKNKKDFGWTQEIQKIKKDFENFQKNKKDNKDLKFDKNKLSKLIEYYQNCLEKGNYKKEFDFEWKKPEEYQSMSEFNQDIEKKNYKIKFIPVKDSYIEEKVANGELYLFAISNKDFIWPDQKKNIHTLYFFNLFSDKNIQKPIFRLGANAEVFYRPASVKKELDKGRSKEGKEIIKYKRYTEDKIFLHLPIEINYGCPKVPNEEARKKAFAAKYNNKLIEFLSKNINKINIIGIDRGEKNLLYYTVINQKGEILAHKSLNEINGVNYLEKLIEREKKRQIDRQSWEPVVKIKDLKKGYLSYVVRKIADLVEKYNAIIVLEDLNFGFKQKRTKIERTIYQQFEKQLIDKLGYLVFKDDRGSESPGGVLSGYQLVAPFTNFKDLGKQTGIIFYTNAEYTSKTDPITGYRKNIYISNSASQKTIKENLINKLKSLGWDEKEKSYFFTYNQKDFGSPISKEWTLYSKVPRVRREKNNSNGYWDYQPIDLNEKFEDLFEKYGINKKSSDILSEIKELIKNNEEKLIQKQEFDGKSKKFYERFIYLFNLLLEARNTMSLKVKLDKRGNEIKLDEIDYGVDFFASPVKPFFTTAGIRFIGKQNEDKKIEKQIKEKFAEENFADFKGLFKDCSSDGFDSDGVGAYNIARKGIMILERVKQNPQKPDLYISKEDWDDFALKNAIIK

SEQ ID NO: 61872 - protein, 767 aa, Unknown
  Microbial source - Accession No. Ga0315298_1007594
MARTRYREERTLVRRLCRLPREEEERSEFNHKVLKLREQFKKFNLDASETCQWLMGIRPDGKRANERTKLFWDFFLEPEKFLKEEDKDKSDRCRRVVFDFVAGFEKDTALSEFSFSKELMDSIQAIKSMPRIPCAEKLFQRLVQLNPAHRQVLLKASSEWIFAHYQKAKDNWEFQHKHWEEEKKGWENRYPDLTDEIRKEFTEIFKQMDIREKRPRICPWERLKESKDNCLYAGEKIGKKNHAQLCKKYKDFLDDCKRNNVKKFFAENAEKYLSLKRNQPYLPKEIIIKEFLNKNPKAKWFTDAWDKYLKAMGITEQTILSRGSLPHCVEFGDDKECQFNQHTEKCRQYKALLDAKPELQALEGLYRKWREKYLSGPSKPSFKYPSAKKLSMPKIFGAGFFEVDFNKSILKLRLDDMPEGKFLEFGFIPWPKDYKPQPNETEITSCQVNFIGTRPRVGFRFKTPHKKSRFTISQDEIDELRSRKYPRQEQDQKFLDEARKRLLESFPQDPKKELKILAVDLGEKTGGAVLFKGTDFQKYFPLKVVKMKKLLEIRPEDEKDKNDKISKEEKKELRKKGLGKWHIALHLEARREQAKAIAEKRQKEKEKAELRNFDLRKLTLHTRWMIRDWVRLNASQIIQLAEQNQVDLIVFESMRGFSVPGREEIGKEDKKLAFLAAGQIRRKVAEKAVERGMRIITVPYLESSKHCSICKKLQKDEKIWRKNKLDEHKFRCEKCKAEMNSEENAARVLARVFWGEITLPGQLPDHT

SEQ ID NO: 61873 - protein, 1380 aa, Unknown
  Microbial source - Accession No. Ga0315298_1015991
MPETPAYTTRAYTLRLAGATPEDHAWRGRLWQTHEAVNKGARVFGEWLLTMRGGLDHTLADQQDPQQRRDHRVALALSWLSVESPAEAVASDLIVSRGKDPHEDRSQALEIALREILQQRGLSDADIDSWLVDCRATLGARIRDDAVWVNRSKAFDAITEQPRRPQARVDCQVLLWHLFTHDYLTLPRASLRRRQEQQAQREGADQDPDEGQGEDKRSAVVRSGRGAGTRTRHLFSHIFGGSPTFGKDKHKEKEKERVLALRGHWLAYLQPLVEGAGIPLRDPSQPRRANDGAVPTELHREMLSKAAARLAQIHTKQKQQEIEREQRERADEALRRLEDDPAYKEALALLEAYCDDRRAEWGDYTIRPRALEGWRDVVAAWALCGSEEERVDEVKRLQDEDPDRKFGDPNLFCELAQEKYVPVWRHCGKEDPDLLTRFVKGNAARADAKRLRVAAYRHPDPCFNPVFCQFGISRPAIKFARLGQLRKSKEPGSERSTAVSLLLWDGKAARTTILQALGARLDREIGTVDQQQPLDRDPTLVTRRTRQGFAVAAQESASGEGSRVIGVFDEQDIEKRRPEHDQAAAGKVARKAPEWNGTLQADRRALAAIGRAADAREAARAREQLQWWLTVSIELRPQGPWPTYADKHGIELDRGREGIVTLPTKKADEWRGLAYPCWVDDNKGRHGRDRLVLARLPGLRVLSVDLGHRAAASCAIWETLTRPQVEEICRACGHDAPGEGDIYLHLKRKVLKQDKGGSAREAEATTIYRRLAADTLPDGSPHPAPWARLDRWFTIRLQGEEAQARFATRAEQAAVRDFEKWLGWQAGNRRRSQRIDELVAHAVDLARRGLRRHADHARIAWGLAAPKKQLPGGRRPDGEMSREERVAHLQGVLLRWHDIAFSTQWKDDWAQELWNATLPDYQKPEPIAENASAKEKKAARERNLETLRPAATALAEDSARRLALHEAWKSRWAQDDGAPAQVDRQASGCKQSQGTGWHAHLRWLHDWLLPRGNKSRKRTLRQVGGLSLMRLGTIRDFHRKVQKAFFTRLRPDGTKAEAPESFGQRTLDDLAAMRENRIKQLASRIVEAALGVGSENPLHREGRRRPRQRIADPRFAPCHAVVIEYLANYRPHQSRMRRENRQLMDWSTGRFKQYLAEACALNGLHLREVSAAYTSQQDSRTGAPGIRCEQVVLREFLQSPFWRKKVSSAAKRAGNPFTQLWRDLVNRARKSSPADAATTVLYLPREGGRLFVSASPCLCCQPSSQGLAPINADLNAAANVGLRALSDPDWPGTWWYSPYNLTQSQPCLDKAKGSAAISAGSPPAAPAQATTQEKVINLWRDVSAKPITPENGQPYSRYWNGVQERVVARLRPALGLHHEP

SEQ ID NO: 61874 - protein, 847 aa, Unknown
  Microbial source - Accession No. Ga0315903_10087816
EVRKKYTPTCLADYFHTHFKAQKKTDSEKDYTLTANVEAKHSAIKGILNIPYPNDKKLYQQQKDIDNIKLFLDSVMELLHFVKPLSLNKDSALEKDNSFYGQFEVLFEQLDMLTPLYNKVRNYATQKAYSTEKIKLNFDNSTLLKGWDINKETDNTSVILRKDDQYYIAIMPQDYKKAFQSIPKAIDGESTFEKMDYKQIALPMGVGAFVRKCYGTAMQYGWVCPDDCKNEEGKIIIRQDEIKGNLAALIDCYKDFFDKYEKEGFQYKEYNFKFKDSAAYENLNQFFLEVEQQGYKISFREVAETYINQLVEEGKLYLFKIHSKDFSAHSKGKPNLHTLYWKALFEPENIKDVVYKLLGQAELFYRKASITSDKIIVHRAHEAIDNKNPEKKKATSTFAYDLVKDRRYTVDKFQFHVPITLNFKATGNNYINQDVLTYLQRNPEVNIIGLDRGERHLIYLTLINQRGEILKQLSLNDIINTYKDAAGNTVDVKTPYHTLLDTREKQRAEARENWGAIETIKELKEGYISQVVHIIAKMMVEHNAIVVMEDLNFGFKRGRFKVEKQVYQKLEKMLIEKLNYLVFKDKAPSETGGLYHALQLANKFTSFKEMGKQSGFLFYVPAWNTSKIDPTTGFVNLFDTRYESIEKTKSFFDKFKSICFNPIKNYFEFAFDYTDFTTKADDTKTNWTVCTHGDRIRTYRNPDKVNQWDNKPIQLTQEFEDLLGKYNITYGAGACLKAQIAEQKDKEFFASLLHLFKLTLQMRNSITNSEVDYLISPVANERTGLFYDSRKKNEKLPKDADANGAYHIAKKGLWWLEQIHELEGQEWKKLDLDKSNKGWLAYVQQSK

SEQ ID NO: 61875 - protein, 1000 aa, Unknown
  Microbial source - Accession No. Ga0334883_1024988
AAIRDDAVWVDRSKAFDEAAKSIGCSLTREEVWDMLKGFFGSHEAYLNPAKGSDEESSDTGQEEKAKDLVQKAGQWLSSRFGTGKGADFSRMVGVYQKVADWAGACPGNNAGTDAIANLAAALSEFTPISNDLQGVLGLISGPGYKSATRNLLTQIDAKTTVTQADLTKLKDTAATDKEKCEPKIGSKGQRPYSNAILKDVESVCGFTYRVDKDGQPVSVAHYSKYDDDCSWGSARHSEFAVILDHAARRVSLAHTWIKRAEAERRKFEEDAQKVDQVPKAAKDWLDQFCLERSGMSGALEPYRIRRRAVGGWKEVVAAWSKNSCTSYDDRIGVARALQHDPEIDKFGDIQLLEALAENDAVCVWHKDGDAAKAPDPQPLIDYALAAEAEFKKRHFKVPAYRHPDALLHPIFCDFGNSRWDIRFEIHENVQTSSPHALLLTLWTGSGMNSVQLCWRSKRLAHDLALGQNAQNAGVSEVARADRLGRAASNATKSDKVKIAGLFEQETWNGRLQAPRQQLEAIAKRVEKHGWDENAKKMRDRLQWLVTFSARLQPQGPWCEFAKTNQLRIDPQYWPHADANKTRKGQARIILSRLSGLRVLSVDLGHRYAAACAVWEAVNAEQVEKACQVVGHEAPKASDLYLHLKSKAMKRKKGNQVEVEETIVYRRIGADILPDGMPHPAPWARLDRQFLIKLQGEEEGVREASNKEIWAVHQMEADLGRPVSLIDHLVASGWGGSDKQRARLEGLKQLGWNPAEKFESGGESDLGEASDAYRPSLSVDELMSSAVRTMRLALKRHGDRARIAFAMTAACKPMPGDRKYYFTEAKELSMNDDQVTRSNKHVEFIQDALVLWHGLTSSRGWRDDAAKQLWNDHITRLSGYKAPEEIGEDTSAAERKKKQKENREKLHDVAKVLAEDATLRKVLHDAWKKRWKEDDERWKKELRWFKDWILPRGKAVDDPAIRKVGGLSLLRLATLTEFRRKVQVGFFTRLQPDGIRAETK

SEQ ID NO: 61876 - protein, 1490 aa, Unknown
  Microbial source - Accession No. Ga0334884_1015165
MPQQNKPPVTQRAYTLRLRGAAPNGQSWRDALWQTHEAVNKGAKAFGDWLLTLRGGLDHTLADTKVKGGKGKPDRDPTDEERKARRILLALSWLSVESRLGAPESLIIASGKEPTKDRNDKVVAALEKILKARRVEQNEINAWKNDCLASLSAAIRDDAVWVDRSKAFDEAAKSIGCSLTREEVWDMLKGFFGSHEAYLNPAKGSDEESSDTGQEEKAKDLVQKAGQWLSSRFGTGKGADFSRMVGVYQKVADWAGACPGNNAGTDAIANLAAALSEFTPISNDLQGVLGLISGPGYKSATRNLLTQIDAKTTVTQADLTKLKDTAATDKEKCEPKIGSKGQRPYSNAILKDVESVCGFTYRVDKDGQPVSVAHYSKYDDDCSWGSARHSEFAVILDHAARRVSLAHTWIKRAEAERRKFEEDAQKVDQVPKAAKDWLDQFCLERSGMSGALEPYRIRRRAVGGWKEVVAAWSKNSCTSYDDRIGVARALQHDPEIDKFGDIQLLEALAENDAVCVWHKDGDAAKAPDPQPLIDYALAAEAEFKKRHFKVPAYRHPDALLHPIFCDFGNSRWDIRFEIHENVQTSSPHALLLTLWTGSGMNSVQLCWRSKRLAHDLALGQNAQNAGVSEVARADRLGRAASNATKSDKVKIAGLFEQETWNGRLQAPRQQLEAIAKRVEKHGWDENAKKMRDRLQWLVTFSARLQPQGPWCEFAKTNQLRIDPQYWPHADANKTRKGQARIILSRLSGLRVLSVDLGHRYAAACAVWEAVNAEQVEKACQVVGHEAPKASDLYLHLKSKAMKRKKGNQVEVEETIVYRRIGADILPDGMPHPAPWARLDRQFLIKLQGEEEGVREASNKEIWAVHQMEADLGRPVSLIDHLVASGWGGSDKQRARLEGLKQLGWNPAEKFESGGESDLGEASDAYRPSLSVDELMSSAVRTMRLALKRHGDRARIAFAMTAACKPMPGDRKYYFTEAKELSMNDDQVTRSNKHVEFIQDALVLWHGLTSSRGWRDDAAKQLWNDHITRLSGYKAPEEIGEDTSAAERKKKQKENREKLHDVAKVLAEDATLRKVLHDAWKKRWKEDDERWKKELRWFKDWILPRGKAVDDPAIRKVGGLSLLRLATLTEFRRKVQVGFFTRLQPDGIRAETKEQFGQSALDALEHLREQRVKQLASRIAEAALGIGRMRRPMGGKDPKRPNGRVDEPCHAIVIEDLSHYRPKETRTRRENRQLMTWSSSKVKKYLAEACQLYGLHLREVSAGYTSRQDSRTGAPGIRCQDVPIKEFMRSAFWRKQVAWAEKKRAEGKGDSRERFLCNLNAIWKDKTMADWEQAGVVRVPLSGGEIFVSADPVSPVVKGLQADLNAAANIGLRALTDPDWPGKWWYVPCEPGSFKPVKDKVDGSAAVKPEQALRQSAGVRSGGAGKSKEVINLWRDISSSPLECIECGEWKEYTAYQNEVQCQVIRVLGEQIKGHHKQSYGRVKEDGILFR

SEQ ID NO: 61877 - protein, 664 aa, Unknown
  Microbial source - Accession No. Ga0370516_000963
MLARTRVKKITKTMLKLELKGDPKSLEFLDNLFNEYERLVRIADSFVYYLYPYYANITEQEKLERLKELVQSLDEKAIRKNKRRKREPQEIEEQTITETETKHKYTHSNLLKTLLHRFIKYTKQYYGIDAKYAWLEKQGGLADIMHSNAESAYKHRSIPNMRRRLTNVMPITMSKSPLDENRKDKKNNGRYYKKDAEFIFGNGKIMFRIGRGKHKVTFKIATRFNDAERLGMLIHAIQGDNGFTIGDPCYLVRKETYNGYRYYIMVSISKNVDVKALYEASKNKSKIRIVGVDSNISKYIATMFCIEVDKENKEFKLINAKGINSKDYINAVKKYEEERRKLQQGRMKGKISKKKCSRYKEKEDYTIRNRCGDSKRIDIRRQLIGYICNQILEFTDENNADIIVIEDLKGLNKELKHLRIIKKELGKLYNDVNDKGNNAIDDKINEINKKYKNKIRRPLLEILNKIKEYSNAKDKVKVAKYILKQRQIIEKRIFLLSIMAYYQFKQELEVEALWNGKLLYTINPKYTSQQCLRCGHTNKLNRITQRQFKCIKCKFEMNADFNASANIALMFATKILKLNLKQEEQGESSSMMTVTSATTPLHASINAGSKLGVVADTLSSVASILQGCYEERSPCLGGQTEQPCSARRSIATLDEFLEKRGNGG

SEQ ID NO: 61878 - protein, 687 aa, Unknown
  Microbial source - Accession No. Ga0370516_004838
MLTITKARTRVKKITKTMLKLELKGDPNSLEFLDNLFNEYERLVRIADSFVYYLYPYYANITEQEKLERLKELVKSLDEKAIRKNKRRKREPQEIEEQTITETETKHKYTHSNLLKTLLHRFIKYTKQYYGIDAKYAWLEKQGGLADLMHSNAESAYKHRSIPNMRRRLTNVIPIRVSKIPLAENRRNKDKCNDDKPYERDTAFIFENGKIMFRIGRGKHKVTFKIATRFNDAERLGMLIHAIQGDNGFTIGDPCYLVRKETYNGYRYYIMVSISKNVDVKALYESIKNKSKIRIVGVDSNISKYTATMFCIEVDKENKEYKLINAKGIKSKDYINAVNKYEEERKKLQQGRMKGKKQKKKGSKYKEKEDYTIRNRCGDSKRIDLRRQLIGYICNQILKFADENKADIIVIEDLKGLNKELKHLRIIKKELGKLYNDVNSKGNNAIDDKINEINKKYKNKIRRPLLELLNKIKEYSKNKDRIKVAKYILKQRQIIERRISLLSMMAYYQFKQELEVEALWNGKLLYTINPKYTSQQCLRCNHTNKLNRITQRQFKCIKCKFEMNADFNASANIALRFASEILKLELELKQGESSSMMTATNATTPLHASMNAGSKVSEQGHNDDLVRNGSVASTMSSVASILQDCYERRSPCLGGQTKQSCSVRSIATLDEFLEQKGNVFAMKGNGG

SEQ ID NO: 61879 - protein, 686 aa, Unknown
  Microbial source - Accession No. Ga0370516_008232
MLTITRARTKKITKTMLKLELKGEPNSNSLKFLDNLFNEYKQLVRIADTFIYHLYPYYANITEREKLEGLNKLIRSMERKAIINRRKEKEKKKETDDDFAYQRLPYLFAWLEGKISKESRYTYSHSYLLKTLLHRFIKYAKQYYGIDVKYANLEKQSGLVDIMHNNAENAYKHRTIPNMRRRLINVMPIRVSKRPLPENRRNKDKCNDDKPYERDTAFIFENGKIMFRIGRGKHKVVFKIATRFNDIERLGMLIHAIQGDSIFTIGDPCYLVRKETDNRYRYYIMVSISKNVDVKALYESIKNKSKNKIRIIGIDSNISKYIATMFCIEVDKENKTYKLINAKGIDSKAYINAVNKYEEERRKLQQGRMKGKKQKKKGSRYKEEEDYTIRNRCGDSKRIDLRRQLIGYICNQILEFANENDADIIVIEDLKGLNKELKTLRIIKKELGKLYKDVNSKGNNAIDDKINEINKSKKYKTRRPLLEILNKIKEYSNTKDKVKVAKYIIKQRQIIEKRMSLLSMMAYYQFKQELEVEALWNGKLLYTINPKYTSQQCLRCNHTNKLNRITQRQFKCIKCNFGMNADFNASANIALMFATKILKLKLELNPKQGKDSSTVTSTAIPLHASINAGSKLGVVADTLSSVASTALQGEGEGRLPCLRGQTDKPCSAKRSIATLDEFLEKKGNGG

SEQ ID NO: 61880 - protein, 672 aa, Unknown
  Microbial source - Accession No. Ga0370516_009639
MLTDTRTKVKKITKTMLKLELKGDPKNLKFLDNLFNEYGQLVRIADSFVYYLYPYYANINEQEKLERLKELVQSLDEKAIRKNKRRKREPQEIEEQTITETETKHKYTHSNLLKTLLHRFIKYTKQYYGIDAKYAWLEKQGGLADLMHSNSESAYKHRSIPNLRGLSNVMPIRVSKRPLLENRKSKDNDEYYKRTAEFIFNNGKIMFRIGSKHKGLTFKIAERFNDTERLVILIDAIQGKNDLTIGDPCYLVRKETDNRYRYYIMVSISKNVDVKALYESIKNKSKIRIVGIDSNISKYIATMFCIEVDKENKEFKLINAKGIKSKNYINAVKKYEEERRKLQQGRMKGKKQKKKGSRYKEKEDYTIKNRCGDSKRIDLRRQLIGYICNQILEFADENNADIIVIEDLKGLNKELKHLRIIKKELGKLYNDVNSKGNNAIDDKINEINKKYKNKIRRPLLELLNKIKEYSNAKDKVKVAKYIIKQRQIIEKRMSLLSMMAYYQFKQELEVEALWNGKLLYTINPKYTSQQCLRCGHINKLNRITQRQFKCIRCNFEMNADFNASANIALRFATKILKLNLKQEQGESSSMMTATNATTPLHASINAGSKLGVVIANNNTDGSVASTMSSVASNLQGCDEGRSPCSRGQTKQSCSAKRLVTLGEFIEKKGNGG

SEQ ID NO: 61881 - protein, 405 aa, Unknown
  Microbial source - Accession No. Ga0370516_018229
VGLKPKLLNPRTTFVAVHARLVFTSPEDERAVLDLMRRFSAAYRWIYKRLLEGHDPNELKREGGPMERRFGLNVKYNEGARDLALWKIAVMKELGRPPEKVVFGGRGLFRRLGRKGDLKARLEAKRLWRERRNGLLYCPGDRSQYSGNRNLQLFTRDGALWLRIVLDTTPLTPEERAQSRLFPGESGRTKGHYVDALVQTRSQNLPAILEVVGQKGVAPIGVNLRLHDGRVYATFSRQLPLPVPVYTRQHGVLGVDVNARPFHLALAVVGPDGNLRRYTTIPLEEADRIRERKQGETSRNALENFYWHVAHQVVRLAKEEGVAIAVEDIRRLPKGRRGEGNKRFRRKLHRFAYRAILERIVRVASREGVEVWGVNPAYTSVIGALKYAPMRGLTKDVAAAWVIAR

SEQ ID NO: 61882 - protein, 348 aa, Unknown
  Microbial source - Accession No. Ga0370516_020865
MRVNTKYRTVIIRLYPTPKQEVLLKKAEEEVLKFLHLSRLELQKMLYHKMKEMGIELSMYTVSLLTQRFTGSLGEKAIIPFDTDYNAKFVNDDGIWFVEVQLFKGKGNRIRIPIAKTELPYYEAIDEIQGLPFVITRENNDWFAYVSVPVKAEPSDLVVGVDFNLRMWVASPYEGRPVFFDVREYDQKIDRLQRLRTRYQKRGEEENVNECLRKMKEIVKLAHGNFLARIMERYGVCNLAIEDIEVIYKLTEKDSRMINNWLYSKTALRQFALRAMAKGFNVIEVDPKDTSRLCHKCGNPVRIYGKHERLIACETCGYRDYNRDLNAARNIAKRGSESRNIICPHPSG

SEQ ID NO: 61883 - protein, 422 aa, Unknown
  Microbial source - Accession No. Ga0373397_000168
MKHTKVMRYQIIKPINDTWETLGHVLREIQRETRAALNKTIQLAWEWQGFRAEYKQRYEEYPKTKDHLGYSALHGYAYNRLKDEFYRMNTANLSQTVKRAADKWKSDLKDVMRGDKSIASFKKDCPIDIVSQALRIRKDGSDYILTLSLVSIKYRKELERKQSSFDVLISANDKTQRDILDRLIAGEYKLGASQLLYHKKKWFVNVNYQFEKEETAFDQDNIMGVDLGIVYPVYMAFNNSLHRYKIEGGEIERFRAQVERRKKQLLQQAKYCGEGRRGHGTKTRIQPIEVVSDKVANFRDTVNHRYSRYVVDMAIKHRCGTIQMEDLTGIATDNTFLKSWPYYDLQQKIEYKAHEAGIQVVYIKPDYTSQRCSKCGHIERDNRTEQATFECKSCGFKTNADFNAARNIATKDIEKIIAETLK

SEQ ID NO: 61884 - protein, 426 aa, Unknown
  Microbial source - Accession No. Ga0373621_000479
MGANKEMETIKVTVKATISLKDKGIRKLMREYDAYKKVLISRVKQAVRPIIKDKSIRVYAQQKWMVDKKLNEYLKNLSFHPMPFHRQSVWIEYRKGFLIHFKTAEGEAVCHLHVPEKYYDMILEACGEDNPILGQVELIEDPKYEWINCHIVLRYPKPEPYEPKGWLGVDTGWNKLATSIACEINPHIRFYNPTFHGKDFKTRIIQLRHLLKEYQRKGKKIKMWKNRLKNTIEYAKGMVAKEIVSKAKKHKLGVAMESLTFKAVSKGYLVPRYKLMIAVKTLCEREGVPFKLVPASYTSQTCPKCGYVDEKNRDGERFKCLKCGYQADADIVGAMNISQKAFDSSSDEEENGVGFKPTSKADRGLPREAGRVASPQASMRDDPIERDATQGVARVACKEHCNFAPEESASQIWENCRSRQRTLQLY

SEQ ID NO: 61885 - protein, 378 aa, Unknown
  Microbial source - Accession No. Ga0373621_007959
VNKNNTDLIKVTATCGIDPRDKGIKILMKEYVIFKKNFITKVKGAIRPIVKDRNVRVYSSQKFLLEKKLHEFVKNLPYHPMPTGNQAYWLEKSYYETKNGKKYPCINLHIKTKDGEAVSKLIVPKKYEEYLLKATKKSCPYLHDEKCEFEYCPFETPKMCKKINPHRGELELIEDLKSGYIRAHITLRFPKSKPYEPTGWLGVDTGWNKLAVSIVAKNNPHLRFYAPSIHGKDFKTRIIQLRHKLKELQRNGKVSEVWENRLQNMIKYATGKTAKEIVSKAKKYRVGVAMEDLNFQAVTKGFIVPRYKLMIAIKTHCEREAVPFVLVPAKNTSITCPKCGFVDEKNRNGERFKCLKCGYEADADIVGAMNISKAGVKI

SEQ ID NO: 61886 - protein, 336 aa, Unknown
  Microbial source - Accession No. Ga0373621_010685
MRVNSQYRTVTVRLLPLPEQEILLRKAEMEVIKFLSLSRYELQSMLYHKMKDYGVEISMRSLNLLVQRFTGSLGEKTIIPFDDNAKFVNDNGLWFVEVQLFKERGNRIRIPIAKSEVPYYEAIGELEGLPLLITRENEDWFAYVSIPVKADPNGLIVGVDFNLRKWVASPYIGTPIFFDVREYNEKIDRLQRLSSRYQSREEEEKVKECFRKMQEIVKLAHGNFLSKIMDKYGICNLAVEEVETIYKLVRKENKMINNWLYSKTALRQFILRAMAKGFNVIEVDPKDTTKLCHKCGNPVKIYGKHERLIACEKCGYRDYNRDLNSARNIAKKGKFK

SEQ ID NO: 61887 - protein, 334 aa, Unknown
  Microbial source - Accession No. Ga0373621_017562
MRVSTQYRTVILQAYPDPKQERVLKRCEQSVLKFLEVGRLQLQKMLYHKLKDLDIGRYSLSLLAQRFTGSMGEKALLPFHTDYNARFVEDGGLWFIDAQLLKGRGERVRIPIAKTEVPYYESIQELVGLPFFLARENDKWFAYVSVPVKADPNGTAVGIDFNLRLWVASPYEDSPLFFDARPYSREVDRLQKLIARAQKNEEDVEEHYQSLRGLIKQAHGNFLSAISEKWGICTLVLEDIETMYGMRGLKSKLTNNWLYKKTALRQFALRAMAKGFDVVEVPPRGTSKECHRCGSQLKIYGRHERLVECDKCGLRDYNRDLNAARNIAKGAVDA

SEQ ID NO: 61888 - protein, 347 aa, Unknown
  Microbial source - Accession No. Ga0373621_020135
MKVNSQYRTVIIRLYPLPEQEILLRKAEMEVIKFLNLSRYELQNMLYHKMKECGVELSMYTLSLLVQRFTGSLGEKALIPFDTDYNAKFVNDNGLWFVEVQLFKGKGNRIRIPIAKTELPYYEAIGELDGLPLVIARENEDWFAYVSIPVKADPNNLIVGIDFNLRKWVASPYEGAPVFFDVREYNEKIDRLQRLRSRYQKRGEEEEVKECFRKMQEIVKLAHGNFLSKIMGKYGICNLAVEEVETIYKLVKKENKMINNWLYSKTALRQFILRAMAKGFNVIEVEPKDTTKLCHKCGSPVKIYGKHERLIACEKCGYKDYNRDLNSARNIAKKGSEVSITNSCMVR

SEQ ID NO: 61889 - protein, 356 aa, Unknown
  Microbial source - Accession No. Ga0373621_023545
MPKVFKVAPTVEGNTLKRCVRGAISPRDIGLRKLMREYAIYKHVLIPRVKQAVRQIVKDKTISVYAQQKWMVDKKLNEYLKNLPFHPMPFHNQSVFIENKSGRFWIHFKTKQGEAVCYLYVPAKYHSLIEKACGEDFTRNPVLGQVELIEDKHYGWVNCHITLRLPKPEPYEPKGWIGVDVGWNKLATSILATVNPHLTFSHPTIHGKNFKTQIIQLRYLLKDYARKGKAWKKWDYRLKNTIKYATGVVAKEIVLKAKRHKAGVVMEKLAFKSVTKGYIIPRYKLMVAVKTLCEWEGVPFKLIPAKYTSITCPKCGYKDEKNRLSERFTCLKCGYQADADIVGAMNIAKTASQMEG

SEQ ID NO: 61890 - protein, 405 aa, Unknown
  Microbial source - Accession No. Ga0373621_050562
LDSETARLCVKAVISPYDLGLDKLLHEYKLYKKMLIPKVQQAVKQIVKDKSIPVYSDQKWLVVKKISEYLRELPLHPMLFGNKSYWIEKRGGEFWIHMKTKDGEAICLLNVPEKYRDVVEKACGETCPYMRNSKCEFTKCPFNTPKMCNRINPHRGEMRLAQDARYGWINCHITLRLPKPEPYEPKGWLGVDVGWNKLATSILATVNPHVRFSNPTFHGKEFKTRIIQLRHLLKEAQRRGRVVKTWRNRLKNTTDYAVKVVAKEVASKAKKFKAGVAMEKLTFKPISKGYLIPRYRLMIAVKTLCEREGVPFKLVPARYTSITCPKCGYRDEKNRNDEWFKCLKCGYQTDADLAGAMNIALRALDGTADGAVNDVRHASRLKPRRLYASKAGCVAQPKAAMRDVS

SEQ ID NO: 61891 - protein, 1477 aa, Unknown
  Microbial source - Accession No. Ga0373637_0010996
MSPNATPPVTQRAYTLRLRRAPGRCPKCQNDTCDCWRDALWATHEAVNRGAKVFGDWLLTLRGGLHHTLADMEVPAKGKGSSRAPTQEERRHRRVLLALSWLSVEDEGGAPNGDGLRVTTGRYSDNDRREAVEAALREILEKRGVQPSEIEEWVRDCGPSLAARIRKDAVWVNRSALFDAVCGGQNVRQAREDARTLLWYLLTDHYLALPKTDKKQSEGSDEDQEDGEEKEPTVDAAAEAVAKSAKGAGQRTRHLFSHIFGRKSTQGFGKPRRKLDLREHWRGYLKPRIETAGIPLSDPDVKAKKKAALSPTEVHREMFSKAASRLAQTWTRQKQQEVARQLGAAADEELNKLEGDKAYCKALELLDAYCRERGQASGSLEEYRINPRAAEGWERVVVAWERINEADRAKATEKRIDEVKRLQSENFDKKFGDINLFVDLAEPEYEPVWQHNGQATPSILKTYVKGWKARTDAARLKVAAFRHPDPYFHPVFCQFGVSRPPIQYGRLGTNWDGDTRTVRMRVWNGSRAVDLPLLAVSKRFDAEIGSASESMEKAEPEVTRRSRLAIAAVPNGRIQGNRFRVASVFDQQDVRSRQKADNGTQEDTDDEDSRNGKDKEKKKEPTWNGTLQADRWALKSIGRLPCSDLQKKQQAKRRLQWRLTVALELQPIGPWYDYVRNAADPFPFQRTIRKNDKGIKRQKEKKYLSINGWPFEEINKPLRDGGAKLVVDKQSVRGRDANVILSRLPGLRILSVDLGHRFAAACAVWEALPKDKFEKEIANLEALAGGSGKDDLYLHVAKPGDDGKTRTVVYRRIGPDDLPDGKAHPAPWARLDRQFLIKLQGEDEEAREASNEEIWAVHQLEAELGRAVPLIDRMVRGGFGQKVEQKWRLEALRGLGWRPAATNVPPGAADEEEGEARKISRSVDELMSAAVRAMRRSLKRHGDRARIAFAMTADYKPMPGDRKYYFNEARDASRGDDAASRRGKRVEFLQDALSLWHDLFSSRGWKDDAAKVLWDEHIATLLGYQTPEETAENLTNVERKKKRKEYRDKLRAAAEALAVDDRRRAELHEAWKKRWESDDAQWNKRLRWFKDWILPRGKAKKDPGIRHVGGISLVRLATLTEFRRKVQVGFFTRLRTDGTRAEIEESFGRSALDALDRLREQRVKQLASRIVEAALGLGRVKTPKKGNTPKRPREAVDASCHAVVIESLTHYRPDDLRPRGENRQLMTWSSSKVKKYLAEACQLNGLHLREVPAGYTSRQDSRTGAPGIRCQDVPVKEFMQSLFWRKQVAQAEKKVTDGKGDACERFLVDLNAKWKDQTEAAWKSAGSVRIPLKGGELFVSADPGSPAAKGIQADLNAAANIGLRALLDPDWPGRWWYVPCKPGTSEPALDRIKGSAAFEGVQVLPADGAAPAGSEAGKRQPKKSKSKAPKKIEYLWRDPSGGVLAAGRWKQTQAYWNDVQYRAVQLLRKRAGLDSYG

SEQ ID NO: 61892 - protein, 1352 aa, Unknown
  Microbial source - Accession No. Ga0373637_0021496
MSNKTTNQKSIWSEFTKQYALNKTLRFELKPVGRTEDFLKQNKVFEKDKTIDDSYNQAKFYFDKLHQKFINESLSLNNAKAIDLKYFAEQFLKLKSQIQKLKSENKKEEVNKKEKEINNLRNDYYKKIKSLLDKKAKEWKEIYKKKEIKFSKSDLEQKGTDFLMKSGILGILKYEFPKEKEEEFKSKDYPSLFVADKANPGNKVYIFDSFDDFATYLIKFQETRKNLYKDDGTSTAVATRVISNFEKFFNNKKIFEDKYINYWKQVGITEEEKKIFEIDYYYSCFTQEGIDEYNKIIGQINQKSKQYRDKNKVEKSELPLFKVLDKQILGEVIKERELIVKTETETEEEVFIKRFKEFIDQNKQRIPKAQNLMNDLINEKFENEYSGIYLKNSAINTIANRWFKNAIEFLRKLPQASKSKENKESPKVKPFVSLLDIKDALDEFEKERESLGSIFKDKYYKTKESDEVPLNNDRESYWKQFLKILGYEFNQLFEDKFNEEGIKTFWGYTKDLEKEAENLNSFSRKKEEITVIKNYCDASLRIYQMMKYFTLEAKKQDDIPLDYSTEFYNRFNEYYQDFKFVHYYDAIRNFVTKKPSNEDKTKLNFESGSLLTGFDKNKESEKLGIILKNKNNNKYFLGIINKKHNKIFELKNENEFIGNPAKDLYEKMELKLFPDPKKMIPKIAFADKNKKYFGWIQEIQNIKKDFENFQKNKKGNQDLKFDKNKLSKLIEYYQNCLEKGNYKKEFDFEWKKPEEYQSMSEFNQDIEKKNYKIKFIPVKDSYIDDKVKNGELYLFEISNKDFIWLNQKKNIHTLYFLSLFSEKNIQKPIFRLGANAEIFYRQKSEKATKEKRGGKEIIKYKRYTEDKIFLHLPIEINYGCPKAPNKNQYNKKVIEFLNKNKDEINIIGIDRGEKNLLYYTVINQKGEILDHGSLNEINGVNYLEKLIEREKERQINRQSWEPVVKIKDLKRGYLSYVVRKIADLVEKYNGIIVLEDLNMRFKQVRGGIERSIYQQFEKQLIDKLGYLVFKDYRDSDAPGGVLNGYQLVAPFTTFKDLGKQTGIIFYTNAEYTSKTDPITGYKRNIYISNSTSQKKIKENLINKFRAIGWDEKEKSYFFTYNQKDFNSPISKEWTLYSKVPRVRREKNNSTGYWEYKPIDLNKEFEDLFKKYEINEKSKDILSEIKELIKNNENKLTQKQEFDKKNKNFYERFIYLFNLLLEARNTISLQIKLDKRGNEIKLDEIDYGVDFFASPVKPFFTTAGVRFVGKQIEGGKIQKEKKEKFAIKNFADFERLFKGCSSDGFDSDGIGAYNIARKGIIILERINQNPKNPDLYISKEDWNDFAIKNALVK

SEQ ID NO: 61893 - protein, 1485 aa, Unknown
  Microbial source - Accession No. Ga0373637_0024972
MSQNPAPPVTQRAYTLRLRRGPGKCPACQKDACDCWRDALWATHEAVNRGAKAFGDWLLTLRGGLCHTLADIDVPAKGKKPARNPTKQEQRDRRVLLALSWLSVEDERGAPNGDGLRIATGKEPADKRGEAVKAALRNILGNRGVNASEADSWVKDCEASLAASIRDDAVWVNRSAAFDAACNGQNLRQAREDARTLLWYLLTDDYLVLPKANKKESEDTGEDQEEGQDEESAVDEAAEAVAKSAKGAGQRTRHLFSHIFGRQSTQGFGKPPCQLDLRDYWQGHLKPLIEAAGIPLSDPNVTAKKGAAPSPTELHREMFSKAASRLAQIWTKQKQQEVARQLRAAADDELKELESDQTYSKALDLLEAYCRERGQITGSLEEYRINPRAVEGWERVVAAWEGIKSSDPTEAQQRRIDEVKRLQDESDDKKFGDNNLFVSLAEPEYEPVWQHKGQATPSVLKTFVKGWKARSDAARLKVAAFRHPDPYSHPVFCQFGVSRPWIKHGRLDPKGNAGTVQMLLWTGSKADKVQISAVSKRFDAEIGSASESTVIAARQVARRHRLAVAAVSTSGAGVNTIRVAHVFDQQEVRSRERAVEHGIEDENGDDESQNARKKGPIWNGTLQADRQALKAIGKLASSQKAPQAYRCLQWRLTVALELQSSGPWYDYVRNATDQSPFQRTVRKDEDKGKKRKKGTKYLFLDGWPFEEVNNPLKVNRVDTLLLADKRSARGREAKIVLSRLPGLRVLSVDLGHRYAAACAVWEALPNAAFKGEVAGLKVRAGGPGEDDLYLHVEKPGDDGKTKTVIYRRIGPDSLPDGQFHPAPWARLDRQFLIRLQGEDEEAREASNEEIWKVHQLEAELGRTVPLIDRMEKGTFGQTEKQKQRLEALRGLGWTPATTNVPPGAAGEEEGETRIVSRSVDELMFAAVRTMRLALRRHGDRARIAFAMTGDHKPLPGGRKYYFDEAKGASASDDEATRRSKRIEFLQDALALWHDLFSSRGWKDDAAKKLWEQSVATLSGCQTPEEIAEDLTAIKRKKKREENRDRLRAAAEARAAAEALAAAEALAADDRRRKELHDAWTKRWELDDAQWKRRLRWFKDWVLPRGKAGNDPGIRHVGGLSLTRLATLTEFRRKVQVGYFTRLHPDGMKRETRESFGQATLDALDRLRDQRVKQLASRIVEAALGIGRIKTPKGGKMPKRPGKAVDDPCHAVVIESLTHYRPDDLRTRRENRQLMTWSSSKVKKYLAEACQLNGLHLREVPAGYTSRQDSRTGAPGIRCQDVRVKEFMQSPFWRKQVAQAEKKRADGKGDARERFLFDLNTKWKSQTEAAWESAGSVRIPLKGGGLFVSTDPRSPAANGIQADLNAAANIGLRALLDPDWPGRWWYVPCKAGTSEPASERIKGSAAFKNVRGLPADGADRAGSEASTGQPRKNKGGASREIENLWRDPSSEGLAAGHWKQTQAYWNDVQYRAVQLLRKRARLDSDG

SEQ ID NO: 61894 - protein, 1289 aa, Unknown
  Microbial source - Accession No. Ga0373637_0031827
VWDILEPFFGTRAAYFAGLEDGEEEDEATHEEEEAKDLVQKAGQWLSARFGTGTGADFDAMAGAYKRIARWAVRASSDYPGKETIHRLATCLKLSGSCDLNGVLRVISGPGYKSATRNHLKTMYGKSKVAREDLDRLKELAEQDAAKCKGNVGRKGQRAWADLVLKDVEKACGFTYLQNDGPARHREFSVMLDHAARRVSIAHSWIKLAEQRRRQFESDAKKLNELRKRAANAVVWLDQFCADRSTATGADTEGGYRIRKRAVEGWTHVLKTWARPSCNTGEERIAAAREVQADPEIEKFGDIQLFEALATDEAVCVWRDQAGKPDASILIDYVVGTTAEHNQKRFKVPAYRHPDALRHPVFCDFGNSRWAIRFAIHDAVGARSKGKRAKTDTNWLQNRHGLRIGLWSGNSVGDVDLQWSSKRLTKDLALDDNPAATATSVTRADRLGRAASGAFGPAAIKNVFEEKDWNGRLQAPRAQLDRIAELEDRGHHAQAEGLRQRLRWLVSFSPRLRPSGPFIEYAASQGIEPNRKGEYYPNAPANKGREGLAKLILSRLPGLRVLSVDLGHRFAASCAVWEAVPNAAFKEEIAGLKVLAGGPGKDDLYLHVAQPGNDSKTRTVIYRRIGADNLPDGKAHPAPWARLDRQFLIKLQGEDEEAREASNQEIWAVHKLEAELGRAVPLIDRMVRGGFGETDNQKRRLEALRGLGWRPAATNVPPGMSDEEEGEARTISRSVDELMFSAVRAMRLALKRHGDRARVAFAMMAEFKPMPGDRKYYFNEARDASAGDDEQSRREKRVEFLQDALSLWHDLFSSRGWKDDAAKVLWDKRIATLPGYQTPEEIAEDLTGAERKKKRKENRDKLRAAAEALAADDQRREELHEDWKKRWESDDEQWNNQLRWFKDWVLPRGKAGDDPGIRHVGGLSLARLATLTEFRRKVQVGFFTRLHPDGTKPEIKESFGQATLDALDRLREQRVKQLASRIVEAALGIGRIKIQKEGKSPKRPRMAVDTPCHAVVIESLTHYRPDDLRTRRENRQLMTWSSSKVKKYLAEACQLNGLHLREVPAGYTSRQDSRTGAPGIRCQDVPVKEFMQSPFWRKQVAQAEKKGADDKGDARERFLVDLNAKWKGQTEAAWKSTGSVRVPLKGGELFVSADPRSPAAKGIQADLNAAANIGLRALLDPDWPGRWWYVPCKAGSSEPSPDRIKGSEAFQGVQSLPADGAAPAGSKAGIGHSKKNKGKTPKEIENLWHDPSSEGLAARHWKQTQAYWNDVQYRAVRLLRKRAGLDSDG

SEQ ID NO: 61895 - protein, 553 aa, Unknown
  Microbial source - Accession No. Ga0373637_0034837
MPFGRTAGPTIVYKYGAKKPTTNAEAILEQLRKAHQYRNKLVEIELQRRKLVEEAVKNIESDVRHLANKLEQLELDIDYTVRKINNHKQKNHTRTTPAELKEHLKSLKTQYREALRQMKEAKKAAYARPETQEALNRIAGKVRAEHKKARNLCGLYWGTYCHVEQITTHIRKGPPPKFRRFAGSGVLAVQLQKGEDIARLESGEDRRIRIEGCGKRRILWLRIGSDENRYPIWATIPFTYHREIPSDAKIKWVKIKAQRIACQTEWEVLFTLERSSGWKKPDLAQDGVVAIDIGWRNFDDRIRVAYWIGSDGCEGEVALPHNMVGKALEQVEHLRSLRDKNFNEIKQQLLDAIGVLQIPEWLKEATKTLHQWRSQGRLAALAIRWRQQRFDGDNDIFALLETWRVRDKHLYEWEAHLRVKAIRRRNDYFANVVANLSRRYKTAIVEDFDLRSVTQVDPTQTEQVGDGRQLYRAHIAAAGGLRQMIKNRFAETQIVSSVLTTQTCTECCEVMNFAAAESVFGKCPHCGHTFDQDRAAAINLMRRYEERLVAANS

SEQ ID NO: 61896 - protein, 1209 aa, Unknown
  Microbial source - Accession No. Ga0373637_0065620
MKHNSTFENFTGKYSLSKTLRFELVPQGKTKETFSKWIKELENQTADEKKNLLHQDIMRAQKYEKVKKILDEYHKDFIEQALSALGKAKLQGLDEYKRLYDIKKKEKKEAEEFENIKTSLRKQISKALKAHSGFTMLNKDDLFKGKKNSDDGRLLQKFLNDNHKVKQDLEATLRENENDHINLFDLLKSFESFTTYFKNFHENRKNLYSDEDKFSTIAHRLVHENLPKFIDNIRIYEKAKTAGLNVDAIQEQLQQERLLDDIFSIEYFNETLTQQGIDDYNYILGGRAVDPGKPNIRGVNSFINNDINQKAENNKDRIPVMKPLYKLPLFERTSSSFRFDPIENDADLIQRIKSFYYHELLQYREETESEAEPLNILARLKELLKSITDFRDGLYVNGGLTLTQISAKIFGNWNYIGNALSDYYDKHVDPPKPDKKGNPKPVTKKQEEAKRKWLKQKQFPVSLIEKALSEYRKKETNEEVKSKITDTTLCDFFKKCGANEDGKNDLFARVEFKLTDKNEKGETLEELLNTDFASDKKLMQDKPKTLLIKNFLDALQGNFDDISAGLLHFIKVLKPREEVSDKNETFYSEFEKYYKALSEVTPLYNKARNYLTQRPYSVEKVKLNFENSTLLDGWDENKEADNSCVLFRKDGFYYLGIMDKNHRNIFKEYPKANHGESSYEKMIYKLLPGANKMLPKVFFADSNLQHFNPPEDILRIRNTASHSKNGNPQEGFVKAPFSQADCHKYIDFCKASIAKHWDWNSFGFVFSPTNQYADSSDFYKEIERQGYKITFAHVPESYINQLVDDGKLFLFKIWNKDFSLNKKVQNRNSKPNLHTLYWRLLFDNRNLSDITLKLNGEAEIFFRKKSIPEDKLTVHEKGKPIENKNPFNKKKESVFDYDIIKDKRFTVDTFHFHVPMTLNFGADGSDNINSEINAFLQNNHDINIIGIDRGERHLLYYSLINQKGEILKQHTLNLLGNQNYRDLLDKREGDRDEARKTWNLIENIRNLKEGYLSHVVHEIAKLMIEYNAIIVMEDLNFGFKRGRQKVEKQVYQNFEKMLINKLNYLVFKDRQPDKPGGVLRAYQLANKFESFKKLGKQSGVVFYVPAAYTSAIDPITGFVNFLQPLKADSIEKSKKFYGKFKSIRFNPEKQWFEFDFDYTDFIDKAVGKTNWVACTTNTERYAWNKSLNNGKGDQELVRVTQELEVLFGD

SEQ ID NO: 61897 - protein, 605 aa, Unknown
  Microbial source - Accession No. Ga0374803_055
MRYRNSRDVVGKVKSVTVSKHAGKWFVSIQTEREVDRPIPQGGAVGMDMGIARLATLSDGTFYAPLNSFKRHEARLRKAQQALSRKVQFSNNWKKAKARLQRIHSQMANARRDFLHKVSTAICKSHAMVCIEDLQVRNMSKLAAGTADAPGKNVRAKSALNKAILDQGWYEFRCMLEYKLAWKGGRLIVVPPQNPSRTCPCCGHVSSDNRQTQAWFECVACGYENNADRGSGPEAFRGSGPEAFRGSGPEAFRGSGPEAFLVGAINILACGIQLLRDEGQDTTDAAVGMRVGEPPVSARMACGSNRTGGRKQEPAETTAQGAIHAQRGRNLQPSGRGGCQHSLPSGSAQVRIKKQRSHPQAHFCLPVNPVRTLSATKAAFFSAYPRPINAVYRRVVEELLVELHLTTVNSTFVYDPFFALGLVTLYDGLMEAYHPPEQREAIFNALCKALHLKPEVLRKNARDLLELMGSGDPRQRLDLLCLKPEAEDVGGLKAILERMTQPPYAYSRVLAVGLYTAYEVVAKSLYEEPEERTRRFLENVVSKLPFSTERVRKDLELYRSSLDRMKQARAVVEEMVKAARRQQERRQSAASLPETSLGDPSKPGS

SEQ ID NO: 61898 - protein, 676 aa, Meiothermus silvanus
LRSGCISSRPQRRWFAWLWPGRWTRRVPSPLPWRQAPRNEPWSKLRGWKEIATTRQPWPTWWPGWPTRATPKPDGTWPRAFWPGFLGTGFARTEGKPPLQRAGEQGAPIELAFQSPTGLLALPDPSIPQRTFGSSKEGGEMPFGKKARHVKAYQFGADAPQEGMEAVLEQHRLRTDYYNALVEMELRQREERTALLANLAAESGLESPNQVYERLKAAGEKGIRKHPEYVAARERQKALYGHPRLLELQSRQREERNALRRSFGAKGLYSSNYLDVERAFDKARQSPELRFRRYSPHEGRLAVLYTEGLPMREIGSDTRVQLPLPDPIIYRDRATRRKHQRVLMKFRVRSVERQPLWITVPVYLHRELPDGVCREVSLHWHRVADRLRWTVSVVVEVEGPPVASPTGRGAVAVDLGWRRVEGGLRAGFWVGEDGAGGEIALSEGDLKQFSKVEDLRSIRDQHLNALKEALAAWLEAPPAPLPDWLAEETKTLPQWRSPARFAALFRRWQSERVHADEAAYGLLEGWHKRDRHLWQYEANLREQMILRRREQYRVLAATLARQYDALIVEDFNLRAAAELDQGGSDLPDAARRYRTIASPSTLRDALVNAFAQRGKPVRKLNPAHTTTDCHACGGALVGDPAKELRLYCPTCERFYDQDENAARNLLRRAQEVQAQV

SEQ ID NO: 61899 - protein, 447 aa, Alicyclobacillus acidoterrestris
MIVKTMPYEIIKPLSCDWAVFGEMLRRLRDESFRIKNSAIQYFYEDDIKRREFKKNNGRFPKKGEFYGSSVSVYNYVRPDVKYSAMGNVTLINQLVKSVWIKYKDDVVKRNMSIPSYRPNNPIEINVQSFNSFDFGQACVNLLSRKGVEELKKKLSEVKKKKNKTGGDDNLKFTQEQLNGISTSVTFAFNPGKNNAKQVLNRIISGEYKLSSSKIIYNERKNKWMLAVAYKFEPKTIELDKNRVLGIDMGVVYPAYMAVNYDKYWRDSIDGGQIEQYRKTVEARRRRLQRQAAVCGNGRIGHGRKKRMQPLEKISDKVANFRNTVNHTYAKKIVQNAVKLGCGTIQMEELSGINEKETFLKRWTYFDLQKKIEYRAKEYGIDVIKINPKYTSQRCSECGYIDERNRPKVPDQSKFKCLSCGYETNADFNAARNIATPYIDKIISLNS

SEQ ID NO: 61900 - protein, 1129 aa, Alicyclobacillus acidoterrestris
MAVKSIKVKLRLDDMPEIRAGLWKLHKEVNAGVRYYTEWLSLLRQENLYRRSPNGDGEQECDKTAEECKAELLERLRARQVENGHRGPAGSDDELLQLARQLYELLVPQAIGAKGDAQQIARKFLSPLADKDAVGGLGIAKAGNKPRWVRMREAGEPGWEEEKEKAETRKSADRTADVLRALADFGLKPLMRVYTDSEMSSVEWKPLRKGQAVRTWDRDMFQQAIERMMSWESWNQRVGQEYAKLVEQKNRFEQKNFVGQEHLVHLVNQLQQDMKEASPGLESKEQTAHYVTGRALRGSDKVFEKWGKLAPDAPFDLYDAEIKNVQRRNTRRFGSHDLFAKLAEPEYQALWREDASFLTRYAVYNSILRKLNHAKMFATFTLPDATAHPIWTRFDKLGGNLHQYTFLFNEFGERRHAIRFHKLLKVENGVAREVDDVTVPISMSEQLDNLLPRDPNEPIALYFRDYGAEQHFTGEFGGAKIQCRRDQLAHMHRRRGARDVYLNVSVRVQSQSEARGERRPPYAAVFRLVGDNHRAFVHFDKLSDYLAEHPDDGKLGSEGLLSGLRVMSVDLGLRTSASISVFRVARKDELKPNSKGRVPFFFPIKGNDNLVAVHERSQLLKLPGETESKDLRAIREERQRTLRQLRTQLAYLRLLVRCGSEDVGRRERSWAKLIEQPVDAANHMTPDWREAFENELQKLKSLHGICSDKEWMDAVYESVRRVWRHMGKQVRDWRKDVRSGERPKIRGYAKDVVGGNSIEQIEYLERQYKFLKSWSFFGKVSGQVIRAEKGSRFAITLREHIDHAKEDRLKKLADRIIMEALGYVYALDERGKGKWVAKYPPCQLILLEELSEYQFNNDRPPSENNQLMQWSHRGVFQELINQAQVHDLLVGTMYAAFSSRFDARTGAPGIRCRRVPARCTQEHNPEPFPWWLNKFVVEHTLDACPLRADDLIPTGEGEIFVSPFSAEEGDFHQIHADLNAAQNLQQRLWSDFDISQIRLRCDWGEVDGELVLIPRLTGKRTADSYSNKVFYTNTGVTYYERERGKKRRKVFAQEKLSEEEAELLVEADEAREKSVVLMRDPSGIINRGNWTRQKEFWSMVNQRIEGYLVKQIRSRVPLQDSACENTGDI

SEQ ID NO: 61901 - protein, 1108 aa, Bacillus thermoamylovorans
MATRSFILKIEPNEEVKKGLWKTHEVLNHGIAYYMNILKLIRQEAIYEHHEQDPKNPKKVSKAEIQAELWDFVLKMQKCNSFTHEVDKDVVFNILRELYEELVPSSVEKKGEANQLSNKFLYPLVDPNSQSGKGTASSGRKPRWYNLKIAGDPSWEEEKKKWEEDKKKDPLAKILGKLAEYGLIPLFIPFTDSNEPIVKEIKWMEKSRNQSVRRLDKDMFIQALERFLSWESWNLKVKEEYEKVEKEHKTLEERIKEDIQAFKSLEQYEKERQEQLLRDTLNTNEYRLSKRGLRGWREIIQKWLKMDENEPSEKYLEVFKDYQRKHPREAGDYSVYEFLSKKENHFIWRNHPEYPYLYATFCEIDKKKKDAKQQATFTLADPINHPLWVRFEERSGSNLNKYRILTEQLHTEKLKKKLTVQLDRLIYPTESGGWEEKGKVDIVLLPSRQFYNQIFLDIEEKGKHAFTYKDESIKFPLKGTLGGARVQFDRDHLRRYPHKVESGNVGRIYFNMTVNIEPTESPVSKSLKIHRDDFPKFVNFKPKELTEWIKDSKGKKLKSGIESLEIGLRVMSIDLGQRQAAAASIFEVVDQKPDIEGKLFFPIKGTELYAVHRASFNIKLPGETLVKSREVLRKAREDNLKLMNQKLNFLRNVLHFQQFEDITEREKRVTKWISRQENSDVPLVYQDELIQIRELMYKPYKDWVAFLKQLHKRLEVEIGKEVKHWRKSLSDGRKGLYGISLKNIDEIDRTRKFLLRWSLRPTEPGEVRRLEPGQRFAIDQLNHLNALKEDRLKKMANTIIMHALGYCYDVRKKKWQAKNPACQIILFEDLSNYNPYEERSRFENSKLMKWSRREIPRQVALQGEIYGLQVGEVGAQFSSRFHAKTGSPGIRCSVVTKEKLQDNRFFKNLQREGRLTLDKIAVLKEGDLYPDKGGEKFISLSKDRKLVTTHADINAAQNLQKRFWTRTHGFYKVYCKAYQVDGQTVYIPESKDQKQKIIEEFGEGYFILKDGVYEWGNAGKLKIKKGSSKQSSSELVDSDILKDSFDLASELKGEKLMLYRDPSGNVFPSDKWMAAGVFFGKLERILISKLTNQYSISTIEDDSSKQSM

SEQ ID NO: 61902 - protein, 1076 aa, Sulfobacillus thermotolerans
MSARNIKVKIDTKGNPELRLGLWKTHQVTNEGVKYYTEWLIKLRQQDIYRQSREDASPRVIISASDLKADLLCHARQLQKERLPRITGSDAEILGTLRQVYELIVPSSVGKSGDSKTLARKFLSPLTDPGSAGGRDQSASGRKPTWMKMKSEGNPRWEETFRKWKDRKDNDPTPLVLNQIADYGLLPLIPLFTDVGENIFDPKSKSQFVRTWDRSMFQQAIERLMSWESWNQRVRREWEALNQKHSAFYREQFTADPDAALYRVAQSLEEEMRKEHQGFASDAPEAFRIRRVALKGFDRLLERWQKTLGKNGQSATLLDDIRRVQSDLGDKFGSAPLYQKLLDERWQRLWAVDPTFLQRYAAFNDLTQRLQRAKRVANLTLPDAVAHPIWSRYEGANASSGNRYHIHLPTKGQPGSVTFDRILWPDGNGGWYERKRVTVFLRPSHQVDRIHEAPTDSVVDNFPLVVEDQSARTILRASWGGAKLEYDRNRLPRQLKKGVPDSIYLSLTLNLDTNKPSGLFHTQQNGRVWIRKDVLMQYYNETPGDNVQFKPLYVMSVDLGIRSAAAVSIFSVQLKAGIEEHRLTYPVADCPGLVAVHERSVLLTMPGERREQWDRRYEQQRQGLRELRTDMRGMNDLLRGAYMDGDRREEFLARLSKLEETSPELWGPVYRSLNDSKVASATEWERLVVYCHRQVEQSLSSRIQNLRSGRSAYRMSGGLSLDHVQDLERIRGIIASWTNHPRIPGSVVRWQQGRSHTVALGRHILELKRDRVKKVANYLIMTTLGYAYDSKRARGEKWVRRYPACHLMVFEDLTRYRFRTDRPRSENRQLMRWTHQELIAVTGIQAEPHGISVGTMYAGFSSRFDAVTKAPGVRGATVRQILRTRGMVRLKEIAADVGIDINTLRPHDVLPTGDGEYLLSVVRHGESYRLKQVHADINAAHNLQRRLWTQDEVFRVSCRLALNSGRVVAMPPPSYNKRYGKGFFEKGDNGVYIWKTGGKIKISDTLEEDMDIPEDTAELLRGNSVTLFRDPSGTIAGGNWLEAKEFWGRVNSLVNKGVRDKILGGIPVDNSSAHAE

SEQ ID NO: 61903 - protein, 1090 aa, Laceyella sacchari
MSIRSFKLKLKTKSGVNAEQLRRGLWRTHQLINDGIAYYMNWLVLLRQEDLFIRNKETNEIEKRSKEEIQAVLLERVHKQQQRNQWSGEVDEQTLLQALRQLYEEIVPSVIGKSGNASLKARFFLGPLVDPNNKTTKDVSKSGPTPKWKKMKDAGDPNWVQEYEKYMAERQTLVRLEEMGLIPLFPMYTDEVGDIHWLPQASGYTRTWDRDMFQQAIERLLSWESWNRRVRERRAQFEKKTHDFASRFSESDVQWMNKLREYEAQQEKSLEENAFAPNEPYALTKKALRGWERVYHSWMRLDSAASEEAYWQEVATCQTAMRGEFGDPAIYQFLAQKENHDIWRGYPERVIDFAELNHLQRELRRAKEDATFTLPDSVDHPLWVRYEAPGGTNIHGYDLVQDTKRNLTLILDKFILPDENGSWHEVKKVPFSLAKSKQFHRQVWLQEEQKQKKREVVFYDYSTNLPHLGTLAGAKLQWDRNFLNKRTQQQIEETGEIGKVFFNISVDVRPAVEVKNGRLQNGLGKALTVLTHPDGTKIVTGWKAEQLEKWVGESGRVSSLGLDSLSEGLRVMSIDLGQRTSATVSVFEITKEAPDNPYKFFYQLEGTEMFAVHQRSFLLALPGENPPQKIKQMREIRWKERNRIKQQVDQLSAILRLHKKVNEDERIQAIDKLLQKVASWQLNEEIATAWNQALSQLYSKAKENDLQWNQAIKNAHHQLEPVVGKQISLWRKDLSTGRQGIAGLSLWSIEELEATKKLLTRWSKRSREPGVVKRIERFETFAKQIQHHINQVKENRLKQLANLIVMTALGYKYDQEQKKWIEVYPACQVVLFENLRSYRFSFERSRRENKKLMEWSHRSIPKLVQMQGELFGLQVADVYAAYSSRYHGRTGAPGIRCHALTEADLRNETNIIHELIEAGFIKEEHRPYLQQGDLVPWSGGELFATLQKPYDNPRILTLHADINAAQNIQKRFWHPSMWFRVNCESVMEGEIVTYVPKNKTVHKKQGKTFRFVKVEGSDVYEWAKWSKNRNKNTFSSITERKPPSSMILFRDPSGTFFKEQEWVEQKTFWGKVQSMIQAYMKKTIVQRMEE

SEQ ID NO: 61904 - protein, 351 aa, Tepidiphilus succinatimandens
MTNIAQRLLVGNGRQHLVRRRLRRRDAAGGKHILDGRDDLFEKPRPAEYVAAAQAHLPLGVRLRRGGHFESDRHDGIEFEKVRDIVDEGQRLAGVDETDRRCIACGKHRRFGDAVERCGGSRQAAIGSVGGLPGFGIVVTMHPAHFVAFGQPLVHFAHARPLDAAKLLDGASLRRLLTEANGEHAAHDFEAQLIVQGELCLIQQPVGTGTARLPGRIEANAGLTHPNEQGTHPRRERAGGMRDARAGLQHQAGHAAHGDMGAHPVDIHDDESAVEYANPAYTSQTCSCCGELGKRSKHRFECPHCGLRAHSDLNASRNLARIGSGAPLSRAVVNTPDVGSVDMGNHVCASQ

SEQ ID NO: 61905 - protein, 352 aa, Tepidiphilus succinatimandens
MTNIAQRLLVGNGRQHLVRRRLRRRDAAGGKHILDGRDDLFEKPRPAEYVAAAQAHLPLGVRLRRGGHFESDRHDGIEFEKVRDIVDEGQRLAGVDETDRRCIACGKHRRFGDAVERCGGSRQAAIGSVGGLPGFGIVVTMHPAHFVAFGQPLVHFAHARPLDAAKLLDGASLRRLLTEANGEHAAHDFEAQLIVQGELCLIQQPVGTGTARLPGRIEANAGLTHPNEQGTHPRRERAGGMRDARAGLQHQAGHAAHGDMGAHPVDIHDDESAVEYANPAYTSQTCSCCGELGKRSKHRFECPHCGLRAHSDLNASRNLARIGSGAPLSRAVVNTPDVGSVDMGNHVCASQY

SEQ ID NO: 61906 - protein, 1144 aa, Alicyclobacillus macrosporangiidus
VAVKSIKVKLMLGHLPEIREGLWHLHEAVNLGVRYYTEWLALLRQGNLYRRGKDGAQECYMTAEQCRQELLVRLRDRQKRNGHTGDPGTDEELLGVARRLYELLVPQSVGKKGQAQMLASGFLSPLADPKSEGGKGTSKSGRKPAWMGMKEAGDSRWVEAKARYEANKAKDPTKQVIASLEMYGLRPLFDVFTETYKTIRWMPLGKHQGVRAWDRDMFQQSLERLMSWESWNERVGAEFARLVDRRDRFREKHFTGQEHLVALAQRLEQEMKEASPGFESKSSQAHRITKRALRGADGIIDDWLKLSEGEPVDRFDEILRKRQAQNPRRFGSHDLFLKLAEPVFQPLWREDPSFLSRWASYNEVLNKLEDAKQFATFTLPSPCSNPVWARFENAEGTNIFKYDFLFDHFGKGRHGVRFQRMIVMRDGVPTEVEGIVVPIAPSRQLDALAPNDAASPIDVFVGDPAAPGAFRGQFGGAKIQYRRSALVRKGRREEKAYLCGFRLPSQRRTGTPADDAGEVFLNLSLRVESQSEQAGRRNPPYAAVFHISDQTRRVIVRYGEIERYLAEHPDTGIPGSRGLTSGLRVMSVDLGLRTSAAISVFRVAHRDELTPDAHGRQPFFFPIHGMDHLVALHERSHLIRLPGETESKKVRSIREQRLDRLNRLRSQMASLRLLVRTGVLDEQKRDRNWERLQSSMERGGERMPSDWWDLFQAQVRYLAQHRDASGEAWGRMVQAAVRTLWRQLAKQVRDWRKEVRRNADKVKIRGIARDVPGGHSLAQLDYLERQYRFLRSWSAFSVQAGQVVRAERDSRFAVALREHIDNGKKDRLKKLADRILMEALGYVYVTDGRRAGQWQAVYPPCQLVLLEELSEYRFSNDRPPSENSQLMVWSHRGVLEELIHQAQVHDVLVGTIPAAFSSRFDARTGAPGIRCRRVPSIPLKDAPSIPIWLSHYLKQTERDAAALRPGELIPTGDGEFLVTPAGRGASGVRVVHADINAAHNLQRRLWENFDLSDIRVRCDRREGKDGTVVLIPRLTNQRVKERYSGVIFTSEDGVSFTVGDAKTRRRSSASQGEGDDLSDEEQELLAEADDARERSVVLFRDPSGFVNGGRWTAQRAFWGMVHNRIETLLAERFSVSGAAEKVRG

SEQ ID NO: 61907 - protein, 601 aa, Tepidibacter thalassicus
MIRTIQVKLHNLSNYKQNLLDNLFQNYTKAYYEMLNYAKENLDVIEKDYKLKNGSYKGETIAKFFKGTEIHKKYNLEPLGDSLKKDVGCSIASYLELKQANADVSFPETNKDRINVLYEKINELLNEISFNTSLSKEQCHNLEQEIKNLYRKINNINKYRPISFARYDFNRDACLLYNPKKNSYYAKLYVFNKITSKEHVKLYKQKSIKHKDDIKLYYLPTLEIYKENRSIAYIIVPLAFGKWHERFLKQARKRKMKFCAMKLIKRGEDFYLDIPLNEDIETRAEKKKRYEEQNKNGEVLRKIKKKKKEFKNKLGIDLGITNIATIAVLDKDNNLLFSKQFNGNEYKEKFEIFVKKLAIMQMHGSSKYPRDKKYISGILHRVANEIIDLSKKYEAQIYLEDLNIDKSHERIKSTKKFENLPNKLVKRVVKNINRWAYGQMYRILVEKCEREGLPKLIRLNPRYTSENCSRCGHNEKVVSKGERVNRESQERFVCKNCGLQINADVNAAINIATKYSKVVSFKSKEVNGYKVINHELFDFKGIGKDNIEALNDFINKLREYKKEYDKIPFEIRKSDKKLRGQYKILKDVDREDYENYYNVED

SEQ ID NO: 61908 - protein, 660 aa, Unknown
  Microbial source - Accession No. JGII2383J13903_1002647
PKATSERTYRKINYKLLPGASKMLPKVFFSDKNTSYFSPDEEIQRIRNHGTHTKNGDPQEGYEKLDFNLNDCHKMIDFFKSSIQKHKDWKNFGFRFSPTYTYDSIDAFYREVEAQGYNITFTEIDESIIDRFVEEGKLYLFRIHNKDFSPFSKGRPNLHTLYWKAIFSPENLKNVIYKLNGQAEVFYRRKSIQPEQMVIHKSGEAIDNKNPLTGKKQSTFHYDLIKDKRYTVDKFQFHVPITLNFKASESNIINYEVLQYLRTQPDVHIIGLDRGERNLIYLSLINQKGELLYQEPLNALKSDKFNVVTNYQELLARREKERDMARKSWGTIENIKELKEGYLSGVVNKIATLMVKHNAILVMEDLNTGFKRGRFKIERQVYQKLEKMLIDKLNYLVFKDKSEDEPGGLFKALQLTNKFKSFKEIGKQNGFIFYVPAWNTSKIDPTTGFVNLFYIHYENMEKARAFFGKFQSISYNHDKGYFEFAFDYNDFTTKAEGCRTNWTVCTHGDRIRAFRNPEKNHQWDYKTIHITEEFMALFRKYGIEFSGNKDLREIITGQKDAAFYKSLLDLFRLTLQMRNTNQDWDYLISPVLNENGEFYDSRKADNHLPQDADANGAFHIAKKGLMWLKQIQQFEGDNWKKLDLDKTNKGWLRFAQGYQF

SEQ ID NO: 61909 - protein, 1151 aa, Unknown
  Microbial source - Accession No. JGI24108J20142_1001595
MPQQDKPPVTRRAYTLRLRGTDPSNTSWRKALWQTHEGVNKGAKKFGDWLLTLRGGLDHTLADAKVKVGKGKPDRDRTDEERKARRILLALSWLSVESKIGAPVGHIIASGEEVAEDRNSKVVAALEEILKSRGLANSEIKEWKNDCSASLSAAIRDDAVWVNRSKAFDDAVKSTVGSSLTREEAWDMLERFFGSRDAYLAPVKISEDESSEVEQEEKAKDLVQKAGQWLSSRFGTGKGADFSHMAKVYERIAAWTDNAQVGTTGNEAINNLAVALSEFIPASEDLKGVLGLISGPGYKSATRNLLKGLDTKTAVTQQDLESLKDKATTDSLKCEQNTGSKGQRPYSDAILNGVEAACGFTYLQDGGSARHSEFAVMLDHAARRVSLAHTWVKRAEAERRRFEEDAKKIAKVPTPARNWLDSFCLERSLASGALEPYRIRRRALGGWKEVVAAWAKSSCSSCEDRISEARKLQDDPEIDKFGDIQLFEALAEDDALCVWHKDGYPAKATDPQPLIDYVLATEAEFKKRDFKVPSYRHPDALLHPVFCDFGNSRWDICFEIHKNRQSPNPNALSVTLWTGSEIKPVSLRWQSKRLARDLALDQEAQGNGASEVTRADRLGRAASNVTKNDEVNIAGLFEQKDWNGRLQAPRQQLEAIAAVRDNLSLSAEERNRRMSGMMDHIRWLVTFSAKLQPKGPWLDYATTNDLKLDQKNGEIVATPSNSKNEWRGLAYPFWHSDNQEGRKGLAKHCLSRLPGIRVLSVDLGHRHAAACAVWEAVSAEQVKKACQIAGHEAPKASNLYLHLKRKATKQKKDNQVVIEETTVYRRIGADTLPDGTQHPAPWARLDRQFLIKLQGEEEGVRKASDEEVREVYQLEAEVGRTAPMDADDGEVRKPSLPVDELMSSAGRTMRLALKRHGDRARIAHYLITNEKIKPGGIKEKLDEEGRVDLLLDTLVMWHNLFSFHGWQDDEARQLWDNHVAKLSGYKAPERIGEECSGKSRKNKQQENREKLRDAAKALAKDITLRKALHEAWKKRWEDDDERWKKQLRWFKDWILPRGKHASDPTIRKVGGLSLTRLATLTEFRRKVQVGFFTRLQPDGTKAEIKERFGQSALDALEHLREQRVKQLASRITEAALGIGRMRRPAGGKDPK

SEQ ID NO: 61910 - protein, 625 aa, Unknown
  Microbial source - Accession No. JGI24721J44947_10029740
MLALKLKIMPTEKQAEILDAMFWKWASICSRIAKMKKKVSVKENKKELSKKIPSNSDIWFSKTQLCQAEVDVGDHKKALKNFEKRQESLLDELKYKVKAINEVINDESKREIDPNNPSKFRIKDSTKKGNLNSPKFFTLKKWQKILQENEKRIKKKESTIEKLKRGNIFFNPTKISLHEEEYSINFGSSKLLLNCFYKYNKKSGINSDQLENKFNEFQNGLNIICSPLQPIRGSSKRSFEFIRNSIINFLMYSLYAKLFGIPRSVKALMKSNKDENKLKLEEKLKKKKSSFNKTVKEFEKMIGRKLSDNESKILNDESKKFFEIIKSNNKYIPSEEYLKLLKDISEEIYNSNIDFKPYKYSILIRKPLSKFKSKKLYNLKPTDYKYYLQLSYEPFSKQLIATKTILGIDRGLKHLLAVSVFDPSQNKFVYNKLIKNPVFKWKKRYHDLKRSIRNRERRIRALTGVHIHENQLIKKLKSMKNKINVLYHNVSKNIVDLAKKYESTIVLERLENLKQHGRSKGKRYKKLNYVLSNFDYKKIESLISYKAKKEGVPVSNINPKYTSKTCAKCLLEVNQLSELKNEYNRDSKNSKIGICNIHGQIDADLNAARVIALCYSKNLNEPHFK

SEQ ID NO: 61911 - protein, 1317 aa, Unknown
  Microbial source - Accession No. JGI24721J44947_10039167
  misc_feature (1191)..(1191): Xaa can be any naturally occurring amino acid
  misc_feature (1193)..(1193): Xaa can be any naturally occurring amino acid
MPQQPTTQRAYTLRLRGADPNETSWREALWQTHEAVNKGAKVFGDWLLTLRGGLDHALADTKVKGKKGKPDRDPSAEERKARRILLALSWLSVESKLGAPADFIIASGEETAEARNAKVIAALEEILRSRDVAEEAIGDVTKKPEDQPGTWIGDCAPSLTAAIREDAVWVNRSKAFDEAVKSIGSSLTREEAWDMLERFFGSRDAYLAPAKGSEDESSETEQEDKTKDLVQKAGQWLSSRFGTGKGADFCRMADVYKKIAEWADNAQADTTGNDAINNLAAFLSEFNPASNDLKGVLGLISGPGYKSATRNLLTQIAAKATVTQQDLARLKDTATEDARKCYQNTGSKGQRRYADSILKDVESVCGFTYLQEGGPARHSEFAVILDHAARRVSLAHTWIKRAEAERRKFEEDAKKIGQVPKAAKDWLDQFCLERSGVSGAQEPYRIRRRAVDGWKEVVTAWSKADCKTAEDRIAAARALQDDPEIDKFGDIQLFEALAEDDAVCVWHKDGDAAKTPDPQPLIDYALAAEAEFKKRHFKVPAYRHPDALLHPIFCDFGKSRWDICFDVHKNTKTPFPRTLCLTLWTGSEMVSVPLCWQSKRLARDLALDHGRQDLGSPKVTRADRLGRAASNVTENDEVKIAGLFEQADWNGRLQAPRQQLEAIARYVAKNGWDEKAKKMRDAIQWLVTFSAKLQPNGPWCAYAEEHNLNKDPQYWPHADTNKDRKSHARLILSRLPGLRVLSVDLGHRYAAACAVWEALSDKAFKEDLEGKKIIRGGTSDNSLYCHTEHEVNGKKHITIYRRIGADTLPDGTPHPAPWARLDRQFLIKLQGEEEGVREASNEEIWQVHQMECTLGRKTPLIDRLVAAGWGSTEKQKARLDALKNLGWKPVEKAETSEDADTEEEELSFRPSLSVDELMSSAVRTMRLGLKRHGDRARVAYYLITDEKTKPGGIKEKLDENGRIDLLQDALVIWHDLFSSRGWRDDAAKRLWDENIARLCGYKAPEEIGENASGVERKTKQKENREKLHGVAKALAQDVTLRKALHDAWKKRWEEDDGRWKKQLRWFKDWVLPRGKHASDPTIRKVGGLSLTRLATLTEFRRKVQVGFFTRLHPDGTRAETGEKFGQSALDALEHLREQRVKQLASRIVEAALGIGRMKRPAKGKDPKRPEVRVDEPCHAIVIEDLTHYRPXEXRTRRENRQLMDWASSKVKKYLSEACQLHGLHLREVSAAYTSRQDSRTGAPGIRCEDVPVKDFLNLPFWKKEVKSAESKDDAQSKYFIALCEKASVMTEEEKKKTSFRIPRRGGEIFVSADETSP

SEQ ID NO: 61912 - protein, 430 aa, Unknown
  Microbial source - Accession No. JGI26463J51803_1000081
MGRVNRYRVLREAQGFRALRILADRVSRLWNAAQFLSRQRYLAGEPVPSYAELCATFQAHESYKALPSDVAQETLKKVRESWKAYFEALRAYREGRVHNPPGLPGYWKDRKTGHRLVRCIPIKHPRSYRVADGILEIPLPPDLRGPEGTRLRLRIRGAKRWHGKEGRLELVWDSARRAWYASQSVEVQCTAHTERPRKFAAVDRGARVPVALAVEGSQEAWVFRSRELWKDYRNLAGRIYRLQALLATRGQHTSRKLRRLFGRRRERVLAAYRALARTVVRILQKTKVTDLLVGDLTGIREDMDFGKLNELVHNFWSFRELASALLDACERAGIRVHLVPEQGTSSHCAVCGQNVVRPLRSRVRCPAGHEIHADVNGALNLLYREPEVRARAEGRPRWCTYRWNGHRWVPTESARRSAQDPGSLQAAPAA

SEQ ID NO: 61913 - protein, 1489 aa, Desulfatirhabdium butyrativorans
MPLSNNPPVTQRAYTLRLRGADPSDLSWREALWHTHEAVNKGAKVFGDWLLTLRGGLDHTLADTKVKGGKGKPDRDPTPEERKARRILLALSWLSVESKLGAPSSYIVASGDEPAKDRNDNVVSALEEILQSRKVAKSEIDDWKRDCSASLSAAIRDDAVWVNRSKVFDEAVKSVGSSLTREEAWDMLERFFGSRDAYLTPMKDPEDKSSETEQEDKAKDLVQKAGQWLSSRYGTSEGADFCRMSDIYGKIAAWADNASQGGSSTVDDLVSELRQHFDTKESKATNGLDWIIGLSSYTGHTPNPVHELLRQNTSLNKSHLDDLKKKANTRAESCKSKIGSKGQRPYSDAILNDVESVCGFTYRVDKDGQPVSVADYSKYDVDYKWGTARHYIFAVMLDHAARRISLAHKWIKRAEAERHKFEEDAKRIANVPARAREWLDSFCKERSVTSGAVEPYRIRRRAVDGWKEVVAAWSKSDCKSTEDRIAAARALQDDSEIDKFGDIQLFEALAEDDALCVWHKDGEATNEPDFQPLIDYSLAIEAEFKKRQFKVPAYRHPDELLHPVFCDFGKSRWKINYDVHKNVQAPFYRGLCLTLWTGSEIKPVPLCWQSKRLTRDLALGNNHRNDAASAVTRADRLGRAASNVTKSDMVNITGLFEQADWNGRLQAPRQQLEAIAVVRDNPRLSEQERNLRMCGMIEHIRWLVTFSVKLQPQGPWCAYAEQHGLNTNPQYWPHADTNRDRKVHARLILPRLPGLRVLSVDLGHRYAAACAVWEAVNTETVKEACQNVGRDMPKEHDLYLHIKVKKQGIGKQTEVDKTTIYRRIGADTLPDGRPHPAPWARLDRQFLIKLQGEEKDAREASNEEIWALHQMECKLDRTKPLIDRLIASGWGLLKRQMARLDALKELGWIPAPDSSENLSREDGEAKDYRESLAVDDLMFSAVRTLRLALQRHGNRARIAYYLISEVKIRPGGIQEKLDENGRIDLLQDALALWHELFSSPGWRDEAAKQLWDSRIATLAGYKAPEENGDNVSDVAYRKKQQVYREQLRNVAKTLSGDVITCKELSDAWKERWEDEDQRWKKLLRWFKDWVLPSGTQANNATIRNVGGLSLSRLATITEFRRKVQVGFFTRLRPDGTRHEIGEQFGQKTLDALELLREQRVKQLASRIAEAALGIGSEGGKGWDGGKRPRQRINDSRFAPCHAVVIENLANYRPDETRTRLENRRLMTWSASKVHKYLSEACQLNGLYLCTVSAWYTSRQDSRTGAPGIRCQDVSVREFMQSPFWRKQVKQAEAKHDENKGDARERFLCELNKTWKAKTPAEWKKAGFVRIPLRGGEIFVSADSKSPSAKGIHADLNAAANIGLRALTDPDWPGKWWYVPCDPVSFESKMDYVKGCAAVKVGQPLRQPAQTNADGAASKIRKGKKNRTAGTSKEKVYLWRDISAFPLESNEIGEWKETSAYQNDVQYRVIRMLKEHIKSLDNRTGDNVEG

SEQ ID NO: 61914 - protein, 1142 aa, Tuberibacillus calidus
MNIHLKELIRMATKSFILKMKTKNNPQLRLSLWKTHELFNFGVAYYMDLLSLFRQKDLYMHNDEDPDHPVVLKKEEIQERLWMKVRETQQKNGFHGEVSKDEVLETLRALYEELVPSAVGKSGEANQISNKYLYPLTDPASQSGKGTANSGRKPRWKKLKEAGDPSWKDAYEKWEKERQEDPKLKILAALQSFGLIPLFRPFTENDHKAVISVKWMPKSKNQSVRKFDKDMFNQAIERFLSWESWNEKVAEDYEKTVSIYESLQKELKGISTKAFEIMERVEKAYEAHLREITFSNSTYRIGNRAIRGWTEIVKKWMKLDPSAPQGNYLDVVKDYQRRHPRESGDFKLFELLSRPENQAAWREYPEFLPLYVKYRHAEQRMKTAKKQATFTLCDPIRHPLWVRYEERSGTNLNKYRLIMNEKEKVVQFDRLICLNADGHYEEQEDVTVPLAPSQQFDDQIKFSSEDTGKGKHNFSYYHKGINYELKGTLGGARIQFDREHLLRRQGVKAGNVGRIFLNVTLNIEPMQPFSRSGNLQTSVGKALKVYVDGYPKVVNFKPKELTEHIKESEKNTLTLGVESLPTGLRVMSVDLGQRQAAAISIFEVVSEKPDDNKLFYPVKDTDLFAVHRTSFNIKLPGEKRTERRMLEQQKRDQAIRDLSRKLKFLKNVLNMQKLEKTDEREKRVNRWIKDREREEENPVYVQEFEMISKVLYSPHSVWVDQLKSIHRKLEEQLGKEISKWRQSISQGRQGVYGISLKNIEDIEKTRRLLFRWSMRPENPGEVKQLQPGERFAIDQQNHLNHLKDDRIKKLANQIVMTALGYRYDGKRKKWIAKHPACQLVLFEDLSRYAFYDERSRLENRNLMRWSRREIPKQVAQIGGLYGLLVGEVGAQYSSRFHAKSGAPGIRCRVVKEHELYITEGGQKVRNQKFLDSLVENNIIEPDDARRLEPGDLIRDQGGDKFATLDERGELVITHADINAAQNLQKRFWTRTHGLYRIRCESREIKDAVVLVPSDKDQKEKMENLFGIGYLQPFKQENDVYKWVKGEKIKGKKTSSQSDDKELVSEILQEASVMADELKGNRKTLFRDPSGYVFPKDRWYTGGRYFGTLEHLLKRKLAERRLFDGGSSRRGLFNGTDSNTNVE

SEQ ID NO: 61915 - protein, 454 aa, Azospirillum sp.
MAEASPNRTVMRTFKFRLYPTAEQDARMRSWCGAVRAVYNAALQQRQWYGRPAGTDWHRRDCRFNANRQSLDLKHARAEFDCLADCPADILMAGLRDLDKAFQNFFAGRARYPSPRRKHQNESFQFRVFQHRKSETHPFYMLVVFGRDSVKLPKIGRIEWVKHAHIRGEAKTATVVREGDRWFICVAAEIVLTPRPAPGGAVGIDVGVAVPLMTSEGEALAVDRTPPHLEKRRRRLQRELSRCRRGSRRRAKRREKLAVIARRISARRKAQLHQVTTDLASRYGLVAIEDLRVRNMTASAAGTVEQPGCNVKAKAGLNRSLLDVSPGQFRLLLTYKVTARGGMVVAVDPRDTSRTCPACGHVDAENRRSQAEFRCVRCGHEDNADANAARNILRRALATLSSATVSGRRKAPSEPRRRSATPKPSVSPSRAGQPSESQVQPKGMIVPDQLLVPG

SEQ ID NO: 61916 - protein, 1501 aa, Oscillatoriales cyanobacterium
MPQQAKPPVTQRAYTLRLRGADSNDPSWRDALWQTHEAVNRGAQAFGDWLLTLRGGLDHTLADTPVKGGKGKPDPDPTDEERKARRILLALSWLSVESKLGAPAGLIIAFGTEAAEERNRKVVAALEEILKSRGVDQNEINAWKKDCSASLSAAIRDDAVWVNRSKAFDEAVESIGSSGSSGSSLTREEPWDMLERFFGSRDAYLAPAKGSEDESSEAKQEDQAKDLVQKAGQWLSSRFGTGKGADFRRMATVYEAIAKWDGKASLEMAGDKAIADLATALSEFNPASNDLQGVLGLISGPGYKSATRNFLNQLAAQTTVTQQDFVSLKDKANNDAQECKQNTGSKGQRPYSNSILEKVESVCGFTYLQDGGPARHSEFAVILDHAARRVSLAHTWIKLAEAERRKFEEDAKKIDQVPEAAKDWLDRFCLERSGVSGALEPYRIRRRAVDGWKEVVAEWSKSDCKTVEDRIAAARALQDDPEIDKFGDIQLFEALAEDDAVCVWHKDGDAAKAPDPQPLIDYALAAEAEFKKRHFKVPAYRHPDALLHPIFCDFGKSRWDICFDVHKNMQTPFPRALCLTLWTGSEMKRIPLCWQSKRLARDLALGNNTGDAGASEVTRADRLGRAASRAASNVTKSDVVNIAGLFEQADWNGRLQAPRQQLEAIARYVEKHDWDQKAEKMRNAIQWLVTFSARLQPQGPWCAYAKIHGLKEDPQYWPHADTNKNRKGHARLILSRLPGLRVLAVDLGHRYAAACAVWEALSTEAFQREIKGRTILRGRTDGNALYCHTRHKANGKERVTIYRRIGADTLPDGKPHPAPWARLDRQFLIKLQGEEEGVREASNEEIWAVHQLEAALGRPVSLIDRLVASGWGGSDKQKARLEGLKQLGWDPADKPSLSVDELMSSAVRTMRLALKRHGDRARIAHYLITDEKTTPGGIKETLDEKGRIDLLQDALVLWHDLFSSRGWRDDTAKQLWNAHVAKLHGYKAPEEPGEDSSGAERKKKQRENREKLYDVAKALAQDVTLREALHDAWKKRWENDDERWKKQLRWFKDWVFPRGNHASDPTIRKRQLINPSGGNGRRGNHASDPTIRKRQLINPSGGNGRRGNHASDPTIRKVGGLSLPRLATLTEFRRKVQVGFFTRLKPDGTRAETKEQFGQSALDALEHLREQRVKQLASRIAEAALGVGRVRRPVEGKDPKRPDVRVDEPCHAIVIEDLTHYRPEETRTRRENRQLMTWSSSKVKKYLAEACQLHGLHLREVSASYTSRQDSRTGAPGVRCQDVPVKEFMRSPFWRKQVKQAEAKQAANKGDARERLLCDLNARWKDRTAADWEKAGAVRIPLQGGEIFVSADANSPAAKGIQADLNAAANIGLRALTDPDWAGKWWYVPCDPASFRPVRDKVDGSAVVNPDQPLRQSAQAQSGDAAKDKNGNKGAGKSKEVVNLWRDISSSPLECIEFGEWKEYAAYQNEVQCRVIRILKEQIKGRDKQPHEGSKEDDIPL

SEQ ID NO: 61917 - protein, 1188 aa, Unknown
  Microbial source - Accession No. 49155357
MPQQDKPPVTRRAYTLRLRGTDPSNTSWRKALWQTHEGVNKGAKKFGDWLLTLRGGLDHTLADAKVKVGKGKPDRDRTDEERKARRILLALSWLSVESKIGAPVGHIIASGEEVAEDRNSKVVAALEEILKSRDLANNEIEEWKNDCSASLSAAIRDDAVWVNRSKAFDDAVKSTVGCSLTREEAWDMLERFFGSRDAYLAPVKISEDESSEAEQEDKAKDLVQKAGQWLSSRFGTGKGADFSHMAKVYERIAAWTDNAQVGTTGNEAINNLAVALSEFIPASEDLEGVLGLISGPGYKSATRNLLKGLDTKAAVTQQDLENLKDKATTDSQKCEQNTGSKGQRPYSDAILNGVEAACGFTYLQDGGSARHSEFAVMLDHAARRVSLAHTWVKRAEAERRRFEEDAKKIAKVSTPAKNWLKSLEVERSLTSGALEPYRIRRRALGGWKEVVAAWAKSSCTSYEDRISEARKLQDDPEIDKFGDIQLFEALAEDDALCVWHKDGDPAKATDPQPLIDYVLATEAEFKKRNFKVPSYRHPDALLHPVFCDFGNSRWDICFEIHKNRQSLNPNALSVTLWTGSEIKPVSLRWQSKRLARDLALDQEAQGNGASEVTRADRLGRAASNVTKNDEVNIAGLFEQKDWNGRLQAPRQQLEAIAAVRDNLSLPSEERDRRMSGMMDRIRWLVTFSAKLQPKGPWCEFAEKLHLKIDPQYWPHADINKNRKGLARLMLSRLPGLRVLSVDLGHRHAAACAVWEAVSAEQVEKACRIAGHESPKASDLYLHLKRKATKQKKGNQVVVEETTVYRRIGADTLPDGTQHPAPWARLDRQFLIKLQGEEEGVRKASNEEIWKVYQLEAEVGRTAPIIDRLFKAGWGRSGQQRVRLEALRELGWRPASEAEISDDMDAEEGEVRKPSLSVGELMSSFVHTMRLALKRHGDRARIAHYLITDEKIKPGGIKEKLDTEGRVDLLLDALVMWHNLFSFHGWRDDEARQLWDKHVAKLSGYKAPERISEECSGKSRKNKQRENREKLRDAAKALAKDITLRKALHEAWKKRWEDDDERWKKQLRWFKDWILPRGKHANDPTIRKVGGLSLTRLATLTEFRRKIQIGFFTRLKPDGTRAEIKERFGQSTLDALEHLREQRVKQLASRITEAALGIGRMRRPAGGKDPKRPGVSVDEPCHACCRNLL

SEQ ID NO: 61918 - protein, 449 aa, Candidatus Staskawiczbacteria
MAKGEKNNDVLYRAVKFEIRPTLNQETILQRISSNLRLIWNEAWKERQDRYEIFFKPIYERIYNAKKKALEKGFTDLWEKEVAKFSQQVLVKRGFPLQLVLEQKSLFAELKKAFEEHGITLYDQINALTAKRSLNTEFGLIPRNWQEETLDALDGSFKSFFALRKRGDKDAKPPSERTNEDSFYKIPGRSGFKVTDDGKVIVSFGKLSETLVGRIPEYQQEKLSHAKNLKKFEIVRDERDMAKSGCFWISIAYEIPKPPELPFNPSKAVFLAIGASWIGIISPRGEFCWRMPRPDFHWKPKINAVDERLKRVSKGSIKWKRLIFARSKMFAIMARQQKQHGQYEVIKRLLELGVCFVVTDLKVRSKEGSLADSSKAERGGSPFGANWSAQNTGNIANLVAKLTDHVSALGGMVIKRKSPELLVEEKRLPQEKRKILLAQKLKDEFLSLN

SEQ ID NO: 61919 - protein, 352 aa, Candidatus Staskawiczbacteria bacterium
MQLVSEKESLLQELSIAFQEHGVTLYDQINGLTARRIIGEFALIPRNWQEETLDSLDGSFKSFLALRKNGDPDAKPPRQRVSENSFYKIPGRSGFKVSNGQIYLSFGKIGQTLTSVIPEFQLKRLETAIKLKKFELCRDERDMAKPGRFWISVAYEIPKPEKVPVVSKQITYLAIGASRLGVVSPKGEFCLNLPRSDYHWKPQINALQERLEGVVKGSRKWKKRMAACTRMFAKLGHQQKQHGQYEVVKKLLRHGVHFVVTELKVRSKPGALADASKSDRKGSPTGPNWSAQNTGNIARLIQKLTDKASEHGGTVIKRNPPLLSLEERQLPDAQRKIFIAKKLREEFLADQK

SEQ ID NO: 61920 - protein, 1152 aa, Unknown
  MTKY01071110.1_o | Anaerobic digester metagenome soeholt_digester_71110
LALSWLSVESKLGAPAGFIIASGTEAAEDRNGKVVAALEEILKSRNLAENEIDEWKNDCSASLTAAIRDDAVWVNRSRAFDDAVESVGCSLTREEAWDMLERFFGSRDAYLAPAKVTEDESSEEEQEEKAKDLVQKAGQWLSSRFGTGKGADFSRMAAVYGKIAAWADNAQAGTTGNQAINKLAADLSEFTPASNDLQGVLGLISGPGYKSATRNLLNGLATKTTVTQQDFGSLRDKAADDAQKCKQNTGSKGQRPYSDAILKDVEAVCGFTYLQQDGGAARHSEFAVILDHAARRVSLAHTWIKRAEAERRRFEEDTQRLANVPGPVKAWLDSFCSERSATSGALEPYRIRRRAVDGWKEVVTAWSKSSCSTSADRIAAARALQDDPEIDKFGDIQLFEALAEDDAVCVWHKDGDAAKAPDPQSLIDYALAAEAEFKKRHFKVPAYRHPDALLHPIFCDFGKSRWDICFDVHKNVQTPFPRALCLTLWTGSGMVSVPLCWQSKRLARDLAIGSNATNAGYVEVARADRLGRAASNVTKSDEVKISGLFEQADWNGRLQAPRQQLEAIAVVRDNLSLSAQERERRMSSMKDRIRWLVTFSAKLQPQGPWCEFAKTNQLRIDPQYWPHADSNKTRKGQARLILSRLPGLRVLSVDLGHRYAAACAVWEAVNAEQVKKACQVAGHEAPKASDLYLHLKRKATKRKKGNQVVVEETTIYRRIGADTLPDGTQHPAPWARLDRQFLIKLQGEEEGVREASNEEVLKVYHLEAELGRTAPIIDRLVKAGWGQSGKQRTRLEALRELGWKPASEAVVSDGMGADEGEVRKPSLSVDELMSSAVRTMRLALKRHGDRARIAHYLITDEKTRPGGVKEKLNENGRIDLLQDALLMWHDLFSSRGWRDDVARQLWDNHVAKLSGYKAPEEIGEESSGPERKKRQKENREKLHDVAKALAQDVTLREALHDAWKKRWKDDDERWKKQLRWFKDWVLPRGKHASDPAIRKVGGLSLPRLATLTEFRRKVQVGFFTRLQPDGTRAETKEQFGQSALDALEHLREQRVKQLASRIAEAALGIGRMRRPMGGKDPKRPNGRVDEPCHAIVIEDLTHYRPEETRTRRENRQLMTWSSSKVKKYLAEACQLHGLHLREVSASYTSRQD

SEQ ID NO: 61921 - protein, 412 aa, Microcystis aeruginosa
MKLVQRHLIKFNKKNYLAFDKLAFLSKNLYNCAVYLNRQAFFSHQPFLTMTELHHALKTSADYQALPAKVSQLVLKQVEKTFKSYQKAEEQFKKSPNKFTGEPKLPRYKDKKKGRNVLTYNYQAISKKALKQGLIKLSGTNLEFKTNLKEVLEVRIIPKSGAYYLEIVYEQPSPPSQEGERYAFVDLGLNNLAAVTSNIPEFQPTLLCGKALKSCNQKYNKTLAKLKSELPSLQKTSKRIQGLTLKRNCQVDYYLHTASRYIIDKLLAHQINLLVIGQNQGWKQNLNIGDRNNQSFVNIPHSRFIEQLTYKAILVGIKVITTNESYTSKCSFLDLEPIGKQEKYLGKRVKRGLFRSSSGYLYGADINGSLNIGRKVVGEVAFSKNPIERLVVSPVRVKAYKADSKCDVCVQN

SEQ ID NO: 61922 - protein, 421 aa, Unknown
  NICF_comb_assmDRAFT_10010420 | GENOME_ACCESSION
MFTKVMRYQIVKPIDVDWDIFGHILRELQHETRIALNKTIQLAWEYHGFSSEYKEKFGKSPNNREVLGYTYLHGYAYDRIKSECWKLSTSNLTQTVKRAADKWRADLPEIIRGEKSIPSFRRDVPIDIVSQSLDISKEEDDYFLDISLISTQYRKQLGRKTGKFRVLIHTGEKSKRAILDRLIDGTYKLGVSQILYHKKKWFINITYQFEGKSLPLDPDTIMGVDLGVTNAVYMAFNNSLHRYKIVGGEIEQFRKQIERRRRELLIQSKYAGEGRSGHGTKTKIAPIEVLEKKAANFKSTVNHKYARYIVNMALKHRCGTIQLEDLSGIREENTFLANWPYHDLQQKIEYKAKEVGIRVVKINPEFTSQRCSRCGHISKENRPDQATFECTKCGLKTNADFNAAKNIATRGIEDLIRQAKS

SEQ ID NO: 61923 - protein, 480 aa, Archaeoglobales archaeon
LQPDKLEREQAIKITVKGVISPRDEGIRTLLQEYKVYKKVLISRISESIKTVIKDKNIRVYSLQKYLLQKKIIEYLKNLPYHPMPYGNQSYWIEERDGKFLIHIKTKNGESVCYLQVPNKYRTLMKKASGKVCPHMNEGKCEFTICPFKTSKMCNKINPYRGEMKLIEDKKYGWINCHITLRLPKPEPYEPKGWIGVDVGWNYLAVSAYVSNEGKISHVTFHGKEWKTRIIQLKYLLKMFQRTGKSTKVWRHRLRNVTNYTVGVIAKEIVRKAKKLKAGVAVEKLTFQAHTKRWLIPRYKLRCAIKNLCERKGIPFVEVSAKNTSIKCNKCGYIDEKNRNGKIFKCLKCKYTCNADFNAAVNIAKKAIEKYKKEKLKAAGKTAIPASYTDAGKDPHAKMTHPQKDVDGVAGRGMLRAPKAPMTNDQPIDDPYKREGNPSIIEDHTQRKAIKTTKQQKLTKYLHLQKQQKITKNRSRKTIE

SEQ ID NO: 61924 - protein, 505 aa, Unknown
  Microbial Source - OGCG01005283.1_o | hot springs metagenome genome assembly
MNTDSKRVLIVRLNPTRDEQIYLISLIKAYTSIAKKLHTDAYAKFKELTANGVIENIKQLKDVKKKFYSWYNEYFKTQRKWITDALGSNVTDQLFQFLRGQYENFFANYENFFKHKIEGRPSFPNLPELFQIRDRGVAIDFDRKILTIKLKGKRLSLRFQADRLLYRGEPGSVTIKQQDGRFYAYIPFDFTPKFEEGKKGAIDIGLVNFFATVTEDGDVILVKAKEYAYVYKKYKEKIKELDRLIGKIKKHILRMYFTPPKSFRRYPFLGFTNNRQVSKIITSLYTSWYDVGRAKKKRLRREDMTSIVKKIRKVDYRLRITKLNFVKSDGSVKLFPKKSPFVRDVYKDLPILHKLEYEKKKLFEKRDRTLTHIRRTAINALLRILRERGVTHVVVGHPYNINKNRNELTVNLFQYRKTINDLKIIGERYGIKVDEIVEYNTSIRCSICGEVHKNGRIERGLYRCEKTGKVINADVNSALNIFYKAFSKMPKQLKKIETIKLHFFT

SEQ ID NO: 61925 - protein, 537 aa, Unknown
  Microbial Source OGCG01007631.1_o | hot springs metagenome genome assembly
VPAKTPSDKNNGKQSRKKENDNKRALTVKLNPTRDDQIYLTSLIKTYTAIANKLNKDAFAKFKELTSNGEIRNIADLKDIKKEFNWWFNEYYKTQRRWITDNLGSNIADQLFKFLTAQYSNFFANYENFFKHKMEGRPSFPSLPELFQIRDRGVEVDFDKKILIIKLKGKQLRLKFQSDRLLYQGDPGSVTIKKVDGKFYAYIPFDFNPKIEEGKKAAIDIGLVNFLATVTEDGDVILVKAKQYTYTYSKYKDRIKELDRMIGNIRKHTLKMYVYPPKSFTYYHFLGFTNDRRIRKIIISLYTSRYDDKRGKKKKLTREDMTNIVKEIHKVNYRLRVRRLNFMKTIGHIKLFPKKSRYMNDVFQDLPILHKLEYERRKLYEKRDRTLRHIRRTAINALLRILKQRGVTHIVVGYPRYINKNRNELTVNLFQYRKTINDLKIIGQRYGMKVEELEEYGTSITCSICGQEHKSGRIERGLYKCEKTGKTINADVNGALNIFYKAFSKMPKQLKKTETIKLTFTPLQRNVTLSPLYYRKL

SEQ ID NO: 61926 - protein, 413 aa, Unknown
  Microbial source - OKRQ01000045.1_o | freshwater metagenome genome assembly
MMKLVQKHLIKFNHKNYSVIDKLGFLSKNLYNCAVYLNRQVFFSHQPFLTMTELHHALKMSPDYQALPAKVSQLVLKQVEKTFKSYQKAKEQYKKSPDKFTGEPKLPRYKDKEKGRNVLTYNYQAISQKALKQGLIKLSGTNLEFKTNLKEVLEVRIIPKLGAYCLEIVYEQPSSSSQEGERYAFIDLGLNNLAAVTSNIPEFQPTLVCGKALKSCNQKYNKTLAKLKSELPSLQKTSKRIQGLTLKRNCQVDYYLHTASKYIIDKLLAHQINLLVIGHNQGWKQNINIGDRNNQSFVNIPHSRFIEQLTYKANLVGIEVKTTNESYTSKCSFLDLESIQKQKSYLGKRIKRGLFRSSSGYFYGADINGSLNIGRKVVGEAAFSGNPIERFVVNPVRVKAYKANSRCNICVQN

SEQ ID NO: 61927 - protein, 1592 aa, Unknown
  Microbial Source - OQOO01000421.1_o | human oral metagenome genome assembly
RSTLFPYTTLFRSGRREVRRRLNERSRALTSRILNALRRVHQRPKHRAGLPRAAKRRQLRDDRHDRERNRQRAARGGRRNSRRNPAEASSGRRREHVEEQLPHGMRDVDTTKGQERVGMFDRRIGRRLTMPKQDKPSVTQRAYTLRLRGADPSDTSWRDALWRTHEAVNKSAKAFGDWLLTLRGGLDHTLADARVKGGKGKPDRDPADAERKARRILLALSWLSVESKLGAPEGYIVASGEEAPENRNGKVVAALEEILKNRNLADNEIGEWKKDCSSSLSAAIRGDAVWVNRSKAFDEAVKSIGCSLTRDEVWDMLERFFGSRDAYLAPAKGSEDESSETEQGNKAKDLVQKAGQWLSSRFGTGKGADFCRMADVYGKIAAWAGANKSNGSATVDDLAKELQKELQIEESKATDGLDWIIKLSSYPGHSPNPVHELLRQNPKLARSNLDDLEKTANTRAESCRSKIGSKGQRPYSDAVLKDVEAVCEFTYLQKDGPARHSEFTVILDHAARRVSLAHTWIKRAEKERSKFEEDAKKIGQVPKAAKDWLHKFCTERSQASGALEPYRIRRRAVDGWKEVVAAWSERSCNTSADRIAAARALQDDPEIDKFGDIQLFEALAEDDAACVWHKDGDAAKAPDPQPLIDYALAAEAEFRKRHFKVPAYRHPDALLHPVFTDFGESRWKICFDVHENLETASPHALSLKLWTGSEVVPVPLRWQSKRLARDLALGQDAQKDGALEVARADRLGRAASNVTKSDEVKISGLFEQADWNGRLQAPRRQLEAIAVVRDNLSLSDQERERRMSGMMDRIRWLVTFSAKLQPQGPWYEFAKTNQLRIDLQDWPHADSNKTRKGHARLILSRLPGLRVLSVDLGHRYAAACAVWEAVNAEQVEEACKDAGHEAPNANDLYLHLKRKATKKQKKDKKIEVEKTTIYRRIGADTLPNGTPHPAPWARLDRQFLIKLQGEKEGVREASNEEVWKVHQLETELGRTTPLIDRLVASRWGGSDKQIARLEELKKLGWNSAEKSDPNGESDEGESRRPSLSVDELMSSAVRTMRLALKRHGDRARIAHYLITDEKTKPGGTKEKLDESGRVDLLQDALVMWHDLFSSHGWEDKAAGQLWGEHVAKLSEYKAPEEIDEGSSVIERKKKQKENREKLYDVAEALAQDETLRKALHDAWKKRWEEDDEQWKKRLRWFKDWILPRGKAANDPAIRKVGGLSLPRLATLTEFRRKVQVGFFTRLHPDGTRAEAKEQFGQKTLDALEHLREQRVKQLASRITEAALGIGSEGGKGWDGGKRPRQRIDDPRFAPCHAIVIEDLTRYRPEETRTRRENRQLMSWSSSKVKKYLAEACQLHGLHLREVSASYTSRQDSRTGAPGIRCQDVPVDEFMRSPFWRHQIAQAEKKQSGGKGDARERFLCDLNARWKDKSEADWKKAGAVRVPLKGGEIFVSADPASLAAKGLQADLNAAANIGLRALIDPDWPGKWWYVPCDPVSFRPIKDKVAGSAAVKLDQALRQPAQAQSGDAKAKKKREKKDAGKPQEVVNLWRDISSSPLGESGEWKEYAAYRNQVQVRVVDILRRAVCSKNNREKQ

SEQ ID NO: 61928 - protein, 521 aa, Unknown
  Microbial Source - OQUW01.1 | hot springs metagenome genome assembly
MKTFKVKLYPTESQSRRMEQWLITLQRHYNRVLAITLWTQRRYNLPVSKSICGGLKTPKKDGDKRPYIYGIYVAAKRRNQFLNDIPADTVNQTIQSRIEAAFDKWAAACKGKKGEDFFKGQPKFANRDRFTSFQFRTRPPRPLFTYDHKGRRYLNIPNAQGADKIGPILCSLSPDTPSDFTKSFCAIQREPDGWYACIVINLENQVRWDKAPHGVVGIDVNIGSIDLSDGTRIPMPFFADRYRDEVLRLTQKLARTRRENKDWRSSKRYADAKKRKAVLEARITRERKAWHANVVAWLVSRYDRIYVENLEPKNMVKNKHLAKAISSQAWGHFFEMLEMKCAEHGRIFGRVPPSYTSKTCSSCGWVNKAKPGEKGYMGLHVRQWVCPECQTHHNRDVNAAKNICAKGEEAFATGNYEKQELGKRKAKSNSKVLLTERTEAKAGTIIIPCPTLDLPTPPNLPAHKRRSKAEWSAKQRAERARRRNKNAKKEKLTSVDLNGQKKNFNGRKEKLANSTQLSLFC

SEQ ID NO: 61929 - protein, 1434 aa, Unknown
  Microbial Source - OQUW01000094.1_o | hot springs metagenome genome assembly
MDKQVAVTQRAYTLRLQGADPQDQSWREALWQTHEAVNKGARAFGDWLLTLRGGLDHTLADAKVKGGKGKPDRDPTNEERRDRRILLALSWLSVESAPKDGDTRKPFVTATGQDSQAIREEKVLCALRGILEKRGVRGADLEGWIKDCTPSLSAAIRDDAVWVNRSEAFDKAVDSIGSSLTRDEVWDMLERFFGSRQAYLAPAEGAEDESAEAEQEDKAKDLVQKAGQWLSSRFGTGKGADFSRMAAVYEKIADWAGKARAGMTGDAAVAGLAAALSEFSPASNDLQGVLRLISGPGYKSATRNLLNQFAARPSVAQEDLENLRDSACDDAEKCKANTGSKGQRAYADAILKDVESVCGFTYLQDGGPARHSEFAVMLDHAARRVSLAHTWIKRAEAERRRFEEDARRMDKVPASVKAWLDGFCLERSEASGALEPYRIRRRAVDGWKELVAAWSNADCRTAEDRIAAARALQDDPEIEKFGDIQLFEALADDEALRVWHKDGDSAKAPDPQLLIDYVLATDAEFKKRQFKVPAYRHPDALLHPVFCDFGNSRWDISFDVHEAVKTGGRNRKNMMVPQDPHALSMTLWTGSTVEPQRLRWQSKRLARDLALKGRQGSNAPEVTRADRLGRAAADVPARATVRIAGVFEQEDWNGRLQAPRAQLDAIAARVARHGWDDKARQMRDHLRWLITFSAKLQPSGPWLDYAAAFPDDAPAKPFVSRKGGYAVRHQDNDAREGHAKLSLSRLPGLRVLCVDLGHRYAAACAVWETLSATQVGDACRAAGREPPRDSDLYLHLKKKVKKQKKGTEVEVEETTIYRRIGADILPDGKPHPAPWARLDRQFLIKLQGEDREARKAGPAELEAVQRVEKEVGREPPDQRALRVDELMSETVRTVRLALQRHGRRARIAFNLTAHKKLLPGGREEVLTAEERVGLLADTLADWYALFTGKGWNDHWARQQWEAHITPLLQGAALPQMPHDAEDMPKARREYEADLMKRLSPVAKSLAGNESLRRQLHCLWATRWRDDDVTLQKCLRRLRDWILPRGRKAKADGAIRHVGGLSLTRIATIKSLYQVQKAFYMRPQPQDLRKNIPSKGDDALVGFGRRILDAMEHMREQRVKQLASRIAEAALGIGRVKRLAGGKDPKRPRQRVDRPCHAVVIENLTHYRPEETRTRRENRQLMSWSSSKVRKYLAEACQLHGLHLREVQAGYTSRQDSRTGAPGVRCQDVPVKQFMQSPFWRKQVAQAEKKRAEGKGDARERFLCDLNAKWNDKLEADWEKAGAVRIPLKGGEIFVSADRDSPAAKGLQADLNAAANIGLKALLDPDWPGRWWYVPCDPATFKPAEDKVAGSAAICLDKPLKNASVAQSTDRRVKKGGKTEARSREVVNLWRDVSSQPISADDNWREFAPYWNDVQARVVRILRQSAGLATDQEER

SEQ ID NO: 61930 - protein, 1256 aa, Unknown
  Microbial Source - OQUW01000235.1_o | hot springs metagenome genome assembly
MTKRKSSLAGYRLHRERILFSGGQVIRTIKFPLTPLNPSKETALFLKDFEKAIIADDLKIRGDLNINDYFVYTAKWKPPYTLFDFWVDSLRAGVIWMPKVTKLIDFLTSQYNITSPFDMVWEKASHRIAVIFQKDKFKDIFLSAPIRNTSTRNSFYERILKSLKDDLVRKNDIISTDAKKEVDLIVNSFFNDDGKLILKGKDQLDFWKREYNLDRSTIESLKPKGAYTDITFVNIPELMHNLDAKQSFEELINKREIWISDKKLLSSILGLSDNFNGFSNYLGVVLKGLQKKDGDIEALYEAQKTIFPRLGNYEDEILNALDFLSQKAKLLGETSLPLVNGWHDYRSVFGGKLQSWFTNSQNRKKELNGQISQFREGLSQVKNYLQKGNFGEEADKEKKDILSFLSLLENFFTDEQKSIKVEVNYQLFESLLALIRRRLNFFYQKYIQKEGNETKVNKYKEFEGLYKTIYKPVAFYGYTAKRANEKFVNKTIPILEDGVENTIKLISYLRDSFSVQKTFESVKQEKEKVDDLYRKFLQFFWNKYVDASINSRLFLEKYEKIIKENIEDSKWKEISDKNRKGRYVFYKSPYAKGSLEKIQIKTNDYLQQLQASVLELAEFILSFKKDTLLSDAILLLDWIELSKNTISLLIRFNTKETYKLDGLLLDIFSQAKRYKELFRRENYPRNEFSFIIQSLILSEIRGAATLYSKKEYIASYSVQVIGADDRYKLYYIPKKEISINADTIKSKPSSIERKQLMKSHNFAIALDKVYEKNKNKTFNAILLSKSGITAVYLPSESLQKLFRLSSSPYQLQFLDKYIYLPDGWENIDISLSEWSFIVEKRYKIDWDLQTKKPTLLPITGSEQAKKNKIYLAIPFNLIPNKQAVQSAPLKVIAKGKETIEKDFSRLNFPILGIDVGEYGIAYCLVRFIFDKNTYKITGVELGSYKEEILGFIEDKNIGNIKDKFAEIQQKARQGAFDEEDNVVARIRENAIGHLRNKIHVIVTQEKSSSVYEDSITNFETGSGRTTKIYNSVKRADTESNTEADKQIHNHVWGEKTKWIGRNIGAYASSYTCLSCLKSLYQIKKEDLAKMIINQKEGRVVTISSRHGNIKGYVSKEEKYDMGYQFKGTDEDLKKIRKIVQDFARPPVTNHSEVLEKYAKKILETGRIEEWRKSRGNSSIFVCPFCQYVADADKQAAFMMAVRGYLRFSGIVPSQSSKKKQGQEEEKTTGESFLEQTQKQLKDIDRSGIKNAFSVRI

SEQ ID NO: 61931 - protein, 1518 aa, Unknown
  Microbial Source - OQUW01001775.1_o | hot springs metagenome genome assembly
MTELQTQRAYTLRLKGIDEKDQSWRDALWKTHEAVNKGAKVFGDWLLTLRGGLDHTLADAEIPGEKGKPDRAPTQEERKHRRILLALSWLSVESERGAPEEFIVATGKEPAATRNDKVIAALKDILRGRNLTEEKISEWTEVCTPSLSAAIREDAVWVNRSRAFDEAVKRIGSSLTREEVWDMLECFFGSRNAYLAPVKISEDESSDGEQEEKAKDLVQKAGQWLSSRFGTGEGADFAKMAAVYAKIAAWAGNAQAGTTGNEVINNLATALREFTPKSNDLKGVLDLISGPGYKSATRNLLKQIANTKTVTREDISKLQETAGEDSEECATKTGSKGKRAYADAILKDVESVCGFTYRIDKDGQPVSVADYSKYDEDYKWGSSRHKEFAVMLDHAARRVSLAHTWIKRAEAERRKFEEDSKKIMQVPQAAKDWLDAYCAQRSEASGALEPYRIRKRAIQGWKEIIASWNKPDCKTAEDRIAAARQLQDDPEIEKFGDIQLFEALAEDDAQCVWKKEDGTLDPEILINYTLASEAMFKKQHFKVPSYRHPDAFLYPVFCDFGNSRWELDFSIREAATKLKEIEAKIEKQRQEVHKVQQALEKCENDEKRPKMEERLKEAQKKLQESQNYGEYLHSNNKITMVLFDGTFVKKHIFAWQSKRLTKDLALYQEPSADPKNVVSRADRLGRAVASVGINDAVKVAGLFEQENWNGRLQAPRQQLEAIAQYVEKHGWDNKAEKMRASIKWFITFSAKLQSKGPWNEFARKHGLKEDPHYWPHAEKNENRTAHSRLILSRLPGLRVLSVDLGHRYAAACAVWEALGSEAFKKDIEGKRIIRGDTDENALYCHTEHEANGKKHITIYRRIGADTLPDGAHHPAPWARLDRQFLIKLQGEDEQAREASNEEIWKVHQLENTLGRRTPLIDRLIAGGWGYTEKQKARLEVLTNLGWCPTNKTDNQEEGDEEETAILSKPSLLVDDLMFSAVRTLRLALKRHGDRARIAHYLITDEKTKPGGVKEKLDKNGRVELLLDALGLWHDLFSSPGWHDEKAKQLWNAYIAGLLPEGELQQAKSVTTSAALGGQQKKEKKEKLRAVAEALYLNSDLCHSLNEVWRKRWEEDDKQWRIYIRWFKDWIMPRGANAKSPAIRHVGGLSLTRLATLTEFRRKVQVGFFTRLHPDGTKTETREDFGQKTLDTLEHLREQRVKQLASRIVEAALGIGSEDKRHWDGKKRPRQRIADPRFVPCHAVVIENLTHYRPEETRTRRENRQIMEWASSKVKKYLSEICQLHGLHLREVSAAYTSHQDSRTGAPGIRCQDVSLIEFMKSPFWRKQVAQAEKKQKEGKGDAVERYLCELNQKWKGASEEEWRKAGFVRIPLRGGEIFVSAAGHDSPAAKGIHADLNAAANIGLRALLDPDWSGKWWYVPCNSSTMCPARDKVTGSAAVNPGQPLQVSAQLESDDAAKDTKKRKKKGDGKSKEIINLWRDISSYPLEDTRGGTWSNKTVYWNRVQSNVVHILQNQMKG

SEQ ID NO: 61932 - protein, 383 aa, Unknown
  Microbial Source - ORXB01007227.1_o | sediment metagenome genome assembly
METVKLCVKGVISPRDAGLRKLMREYVNYKKILIPKVQQAVRQVIKDRGISVYAQQKWMVDKKLSEYLKNLPLHPMPFHNQSVFIEHKDGRFRIHFKTKKEEAICRLSVPAKYHDLIKRACGKDNPVLGQVELMEDRKYGWVNCHIVLRLPRPEPYAPKWWMGVDVGWNKLATSILATANPHLTFSHPTVHGKDFKTRIIQLRHLLKDYARKGKAWKKWDFRLKNTIKYAVGTVAKEIVAKAERHRAGVVMENLTFKSQTKRWLIPRYKLMVAVKTLCKIRGIPFRLVAAKNTSISCPKCGCINAKNRSGERFNCKSCGYQADADITASMNIAKEAIDMGLAPMSTEAADLSAASGDVATPLSADEPMTFIKAGANPRKLKMR

SEQ ID NO: 61933 - protein, 681 aa, Unknown
  Microbial Source - OVXJ01001238.1_o | sediment metagenome genome assembly
LKLTKTILKLELKGDPTSLNSLNDLFNKYDQLVKIADSFIYNVYPIYVSAEQKSLKRLRLKDLVESLDKKAIRKNKRRKERNGIEGEDQQEQDKHKYTCSDLLKTLLHRFIKYADKYYGIDIKYAYLEMQSGLADLMHSNAENAYRFRTLPVLRKLSDTMPIRVSKRPLQENRKNNNDKYYQRTGEFIINGSNIIFRIGGKRNGLYFPIALSFNDAERLKMLSDAIQGNNGLTIGDPCYLVRKRVKGGNSYRYYIQVSVSKNVDKRTIEEAIKNKSVIRIVGVDLGLSKYIATLFCIEVDKANKTYKLIDALGIEGTKEYINAIRKYEEEKKRLQQGKMRGKANSAKISRYKDSEDYTIKNANGDSKRIDLRRQQIGYLCNQIIKFADKNKADIIVVEELKGLNRRLKDLKKIKKVLGKLYNDVNSNGIKSIDEYIKNEAKGKTKDILEILNKIKEYANNHNHNHNHNIRKVTKYILKQRDRIEKRIFLLSVFAYYQFKNELETEALWHDKLLYEVKPSYTSQQCLACRNIDKLNRLTQRQFRCIKCNFKMNADFNASANIALRYVEKLLKIELIPMRNNNDNNDNSSSSSSKQGKGSGTMTITSATTPLHASINASSKAGVVCNNTDGIVAHTMSNVTSTLQGNGEGRPLRVRGQTELPCSVRRLVTLDEFIYEKRGNGG

SEQ ID NO: 61934 - protein, 512 aa, Thermodesulfobacteria bacterium
MITLQTRLQIENKEDLEKLYNLMRRYCSAYRYAYNRLLEKKKETDIRKEIQNLFNINSQYAQSAIWEAKALIRSCKERGQNPKKVIFGGRLLFEKLSKKHLTGKRRRKLKEKWKEKRQKVLYTVGGKYKKGNTNLRLIKNDDNWYLRINVGKKEWIYAKIIRKVKREKDKWIDFIRNLETAENSKGSYAERYFPYTVRVLSKNGKLYAHISYEEKVPEKFKIIKENGIIGIDVNASPFHLALAISSKDGNLLDYKKISLHELINANKNKRKYLEWLIAHEVINYALENNKAIAIEKLEGLKNEKRGSGRAKFRKRLQQFCYRNILEKIKILAKREGIEIIEVNPFYTSVIGKLKYSPIYNIDKDTSAAFVIARRALGFREEIPKNYEKLINDEDYLSYAITELEEKVEEIKKKKNKEKNKYKRNAIKTELKKLKNELNLLKKHLENLKSGKCKPATNNLLIGRNRGVSFQACKAGKYFPQPSLSLTLKNSYKLIVFVGIFLPNQFQGTGGQI

SEQ ID NO: 61935 - protein, 907 aa, Unknown
  Microbial Source - UOVV01006324.1_o | compost metagenome genome assembly
VLGDALNFYYDNVMHPGYEMEYKSANERKKKKLEEEKQAFIQQDYLSIGQLQDALDKYIPEIDDSVDWKRNYTTSCIADYFKNHFNAEKKEGEEKEFTLPANISAKYSCVKGLLENYPKDRELYQDKKAIDNIKLFLDALLELLHFIKPLILRADIALEKDAAFYGQLEPWYDSLKELIPLYNKVRNYATQKPYSIEKFKLNFENSTLLDGWDVNKEKDNSGVLFIKDGHYYLGIMDKKHNKIFRDIPKATSERTYRKINYKLLPGASKMLPKVFFSDKNTSYFSPDEEIQRIRNHGTHTKNGDPQEGYEKLDFNLNDCHKMIDFFKSSIQKHKDWKNFGFRFSPTYTYDSIDAFYREVEAQGYNITFTEIDESIIDRFVEEGKLYLFRIHNKDFSPFSKGRPNLHTLYWKAIFSPENLKNVIYKLNGQAEVFYRRKSIQPEQMVIHKSGEAIDNKNPLTGKKQSTFHYDLIKDKRYTVDKFQFHVPITLNFKASESNIINYEVLQYLRTQPDVHIIGLDRGERNLIYLSLINQKGELLYQEPLNALKSDKFNVVTNYQELLARREKERDMARKSWGTIENIKELKEGYLSGVVNKIATLMVKHNAILVMEDLNTGFKRGRFKIERQVYQKLEKMLIDKLNYLVFKDKSEDEPGGLFKALQLTNKFKSFKEIGKQNGFIFYVPAWNTSKIDPTTGFVNLFYIHYENMEKARAFFGKFQSISYNHDKGYFEFAFDYNDFTTKAEGCRTNWTVCTHGDRIRAFRNPEKNHQWDYKTIHITEEFMALFRKYGIEFSGNKDLREIITGQKDAAFYKSLLDLFRLTLQMRNTNQDWDYLISPVLNENGEFYDSRKADNHLPQDADANGAFHIAKKGLMWLKQIQQFEGDNWKRLDLDKTNKGWLGFAQGYQF

SEQ ID NO: 61936 - protein, 852 aa, Unknown
  Microbial Source - UPSJ01002360.1_o | activated sludge metagenome genome assembly
LKENSHPVVDYFINHFKAKKKEETDKDFDLIANIDAKYSCIKGLLNTPYPEDKKLYQRSKEDNDIDNIKAFLDALMELLHFVKPLALSNDSTLEKYENFYSHFEPYYEQLELLIPLYNKVRNFAAKKPYSTEKFKLNFDNATLLNGWDKNKETDNTSVILRKDGLYFLAIMPQDNKNVFKDSPDLKANEICFEKMDYKQMALPMGFGAFVRKCFGTASQLGWNCPESCKNEEDKIIIKEDEVKNNRAEIIDCYKDFLNIYEKDGFQYKEYGFDFKESNKYESLREFFIDVEQQGYKITFQNISENYINQLVEDGKLYLFQIYNKDFSPYSKGKPNMHTLYWKALFDPENLKDVVYKLNGQAEVFYRKKSIEQKNIVTHKANEPIDNKNPKAKKKQSTFEYDLIKDKRYTVDKFQFHVPITLNFKATGNDYINQDVLTYLKNNPEVNIIGLDRGERHLIYLTLINQKGEILLQESLNTIVNKKYDIETPYHTLLQNKEDERAKARENWGVIENIKELKEGYISQVVHKIAKLMVEYNAIVVMEDLNTGFKRGRFKVEKQVYQKLEKMLIDKLNYLVFKDKDPSEVGGLYHALQLTNKFESFSKIGKQSGFLFYVPAWNTSKIDPTTGFVNLFNTKYESVPKAQEFFKKFKSIKFNSAENYFEFAFDYNDFTTRAEGTKTEWTVCTYGDRIKTFRNPDKVNQWDNQEVNLTEQFEDFFGKNNLIYGDGNCIKNQIILHDKKEFFEGLLHLLKLTLQMRNSITNSEVDYLISPVKNNKGEFYDSRKANNTLPKDADANGAYHIAKKGLVLLNRLKENEVEEFEKSKKVKDGKSQWLPNKDWLDFVQRNVEDMVVV

SEQ ID NO: 61937 - protein, 479 aa, Unknown
  Microbial Source -YNPsite07_CeleraDRAF_scf1119010704098 | GENOME_ACCESSION
MLEYKLAWKGGRLIVVPPQNTSRTCPCCGHVLSDNRQTQAWFECVACGYENHADRGSGPEAFRGSGPEAFRGSGPEAFRGSGPEAFRGSGPEAFRGSGPEAFRGSGPEAFRGSGPEAFRGSGPEAFRGSGPEAFLVGAINILARGIQLLRDEGQDTTDAAVGMRVGEPPVSARMACGSNCTGGRKQEPAETTAQGAIHAQRGRNLRPSGRGGCQHSLPSGSAQVRIKKQRSHPQAHFCLPVNPVRTLSATKAAFFSAYPRPINAVYRRVVEELLVELHLTTVNSTFVYDPFFALGLVTLYDGLMEAYHPPEQREAIFNALCKALHLKPEVLRKNARDLLELMGSGDPRQRLDLLCLKPEAEDVGGLKAILERMTQPPYAYSRVLAVGLYTAYEVVAKSLYEEPEERTRRFLENVVSKLPFSTERVRKDLELYRSSLDRMKQARAVVEEMVKAARRQQERRQSAASLPETSFGDPSKPGS

SEQ ID NO: 61938 - protein, 1108 aa, Unknown
  Microbial Source - Ga0065721_10050166 | GENOME_ACCESSION: BioRi_2199352012_$F_3300005286 GENOME_ID: 23829 CONTIG_ID: 14524
MAIRSIKLKLKTRTGPEAQNLRKGIWRTHRLLNEGVAYYMKMLLLFRQESTGGQTKKELQEELIRHIREQQQKNRADKNMQALPLDKALEALRQLYELLVPSSIGQSGDAQIISRKFLSPLVDPNSEGGKGTSKAGAKPTWQKKKEANDPTWEQDYEKWKKRREEDPTASVITTLEEYGIRPIFPLYTNTVADIAWLPLQSNQFVRTWDRDMLQQAIERLLSWESWNKRVQEEYSKLQEKMTQLNEQLEGGQEWISLLEQYEEQREQELIENMTAANDKYRITKRQMKGWNELYEQWSTVLPNASHEQYREALKRVQQRLRGRFGDAHFFQYLMKEEHHLIWKGNPQRIHYFVARNELKKRLEEAKQNATMTLPDARKHPLWVRFDARGGNLQDYYLTAEADNPRSRRFVTFSQLIWPNESGWMEKQDVEVELALSKQFYQQVTLQKNDKGKQEIEFKDKGSGSTFSGHLGGAKLQLERGDLEKEEKDFEGGEIGSVYLNIVIDFEPLQEVKNGRLQSPYGQVLQLVRRPNEFPKVTTYKSEELVEWMKASQNHSSGVESLESGFRVMSIDLGLRTAAATSIFSVEESNDANAAGFSYWIEGTPLVAVHKRSYMLKLPGEQVEKQVREKRDERQDQQRRVRFQIRILSQVIRMAKKQNRERADELDHLSQALEKQKSLLDQTDRTFWNGIVCDLTDALREKEGGWEQAVVQIHRKAEEHVGKVVQAWRKRFDADERKGIAGLSMWSIEELDSLRKLLISWSRRTRNPQEINRFEQGHTSHQRLLTHIQNVKEDRLKQLSHAIVMTALGYVYDEKKLEWFAKYPACQVILFENLSQYRSNMDRSTKENSTLMKWAHRSIPKYVHMQAEPYGIQVGDVRAEYSSRFHAKTGTPGIRCKMVKGQELQGKRFENLQKRLVNEQFLTEEQVKQLRPGDIVPDDSGEWFMTLSDGSEGKEVVFLQADINAAQNLQKRFWQRYNELFKVSCRVLIRGEEEYLIPKAKSVQAKLGKGLFVKKTDTVMKDVYVWDSQAKLKGKTTFTEESESPEQLEDFQEIIEEAEEAKGTYRTLFRDPSGVFFPEFVWNTQKDFWSEVKRRLYGKLRERFLMKTR

SEQ ID NO: 61939 - protein, 1355 aa, Unknown
  Microbial Source - Ga0255812_10583625 | GENOME_ACESSION: IMG_3300023203_$F_3300023203 GENOME_ID: 30040 CONTIG_ID: 32030
LTIQCAQGGRERIPSGALCRGKPRTPVTWRELVQCHSAEYNPARGGGKFFSDSEDINMATRSIKLKLALGKSKNEAEEARRAQLRSAVWTTHCLFNEGVAYYMNWLMLMRGEAFHKGQTEDELELIGISDGENYFFDKKQMNEEFLRRLKSQQKENGGDEENMPCSEKDPSKTLFADLYEIIVDMAGKKKAQDKKEEDKKAKDRGKKPQESSDTPPDNAENNEDETTEDARDEASLKKAASLAGTYLGFLTKKDSAAGERARIAVEKAPNWANALLANKKNEDRKRLVADWRNAILEWAGGKKDQSTSINGGGRTAAWPEAMKKWIERQNDPNAIEWKTALESKGWLTGYLNWLKGQKKHHDEFGPVGAKLRAAKLVPLFHKFTEHAKVDVKGNAEILDKSCFAEAIRRMGQFETNRIKMEKRKNELENKQKGRDQERNRIPQCLRDCLKEYEKERTRDLGRESLEPKEQYRIMPTGVRRFRQVVYAWNDCLSQNPAAPEDDLKRAAGNVHGRFRRRGFGDPKMFRTLAEAKFRPIWHFDEQNQFPPNWAQADKDTRRNLAQRQADALVKWAEANEADRDAQEARERPRLTIPDPINHPAWMRYEGAGGTNFSPVWFEQTGEGKDARTQLHLDLLEPLDPPKSDATWHVRRVASQSAGKKRKPQPNGSDTTIPIRNTEQIVLTKIGALKKDGKWAYQRLTLQDPSTREQFEGELKGSQLEFGAKGPRLNEENFIKQGFPPCFFSVVVNINTQKSESRPQSYADPIKNGPFKCKNMKPSEWNPDFLREGRRVLSLDLGIRHFAAYSVFRLTQTRPASNRQLFFMVWQRSDWYAVHEVSGCLKLEGEDETPDIIRRREALRNRRLELARAINLLHDLFSLGRLANSKEKQEELMELRNALSENNLPDKIRTMFPQDDLKALDDLAKEQNAPGWWKQEDDGPGECQGVCRIHRKWEETLGKEISEWRRERARFHHEIKEGKVPSGMGGLSFWRLEELDAERRLLLRWSLHSRKYGRRREDGTRPAIFVKSRARGIISGKQNVEWVDTDQRLLEHINNFKEDRRKVGANMIVMAALGYEFHDDRKGKKKDEAKWGQLRDECAHLPKPERARCDLILFENLGGYGFRKDRPRRENSKLMKWAHRSIPKEVMMQGQLFGLRVYDVLAQYSSRVYARNLSPGIRCHLVREVDLEPGSYYHAKWKEEINDTENQSVNKRTNLPKIGELVPEPLGEWFVTLAKDSNKIRICRVNADINAAWNLQRRFWTQEYINPFFQKNGRMFRDSSEIVVPHSEGENGWLPEEKFWEKANEIITDQLARQRATIYRCEQPSGDNCDPFEAEDLANSDGDMSSDDDATDQIRF

SEQ ID NO: 61940 - protein, 1089 aa, Unknown
  Microbial Source - Ga0265297_10015673 | GENOME_ACESSION: Munlanlwell13791_2_$F_3300029288 GENOME_ID: 280701 CONTIG_ID: 15672
MSVKSIELKLHIPYTEDGRKIVNAAGFTHYLHNKGVRYFMEKLLLLRQRDIYEDRGSNAPTRHMDDLKKGLLCYARARQLQNTGRHAGTDEEVLTLLQRMYEALIPAALREKGNTQSIAREWLNSLVSKDSNAGMGKSKSGRSPAYMKKGLTAERKALLKEKYENRQKEKIANEIRPSLKELGLLPFINTFRVDSCYTWLGEEKNGKVTPWDNSSVSCWERDMFQQALERLSTWESWNANADKEYEKAEAELSAWRQNNQDYLNNWQPKFTAYESKRKKEHDDVGFVSEQTFRINGRMLRGWDYIKDKWKNKLKSKPDMSQEDLLAIAKEYQAKRPRECGDMPLLEFLASIDMRGTWQGESDIVLRHLKHNTLIARFEIKHRYTIMTLPDPLKHPLWPRLDVPEGSNMNDYRLLPDGKKGWQVEFRLLFLRGNSQLVEQKLQLPVAPSGQLKFASLTAKPDAKGKHEDIRKISLIDQGTKEQFAAQFGGGRICLKRTLIENFRKAQDLFSKDVSPVYLNITLTVEDKQSISAKAFKWHRSNPAEPWYIVDIKDDTELVKPEYAGMGCLSVDLGVRQMAACSVFRLSKDRADEKRVSFSVVGAKDLYANSERSFLLALPGEKSDKAVKEARNSLWTKLRRLKYSLKLINQLIRLSGESTQKREEIYKGLVNAFTNPEENADPFLDKRLLINIESKISTPDEDWRNAVINIHMQWEVQFAKELAGWRKQFARDAKGRSRYKGIWGLSLDGIEYLESTRRLLISWTTHPRNAGEVKRLPKDKLFAVRLHRHIDGLKEDRIKKSADAIVMSTLGYTTGKEKKHEKCSLILFEDLSRYRFRTDRPRYENKRLMQWAHRAVVKETANQAGMYGIHVGLVGAGFSSRYYSRNMCPGIRCKALDKDDFASPGIAEILAEDKIDIKLLKPGNIVPWNGGELFAALDGKKPMLLHADINAAINLQRRFWTYYADQFRIVCGRLPQGTEVWFKPLRIGKRNERFFQKKSILQLPANTGSGLIGILRPFTAQKLQVIEENAVADLDGLNESEEDEAQASGHYIFFNDPSGNILPKERWYESKIFWTQVKQRLSAALLKKNS

SEQ ID NO: 61941 - protein, 1078 aa, Unknown
  Microbial Source - Ga0315280_10014676 | GENOME_ACESSION: YL17G06_40_MG_2_$F_3300031862 GENOME_ID: 281631 CONTIG_ID: 14675
MSVKSIAVKLVIPRSPGGVAIRRACAETHIIHNAGVRYFMENMLWLRQEDIYEDRDSVRPTRTRSFCQERLLRLAREVQRRNGFGKKASDPEILRLLRGVYEQIIPAAIGESSDNQAIARDWLGSLVSKASEAGLGKSARGRKPAWTELPDSDPRKSQRKHAYEERKKEQKSSQLRPRLKELGLLPLIPMFRSHSGYEWARVETKGKIQPWKDDNVSNWERDMFQQALERLSGWESWNKNAVERHRKAKETLTAWDRAHLQDSETWRPIFARYEASRRGELELGPLGLKRPFRIGRRMLRGWDRIREKWIDVLKKNHSISETDLLDFAKRWQQAHPREIGDMHFIAYLARPQNRAVWSGDHDYVVSQVHHNLLLIDSEEAHPWTILTLPHACIHPLWPRLDVPMGTNMNDYLIARGEDGGWHLTFSLLFPDGKRLTEKRLTLPVAHSGQLDYVRPVADSGRNLILRDPGTDEEFQGKWGGASVRRDRNLLQKLEDESAMRKAACGPVYISLTVDLMDRKGPSTKGFKKTPRGLAGEQFLIGIKEDSSANEILAIQNLGCLSIDLGLRQAAACSVFRMRTKPAQGRSSVPIAGLKRSMEHERSFLLALPGEQADEAVEDKRQKLWDELKKLSDSLGQLNRLIRLSGADGDSRSEGLAALEETETSIFDLKALAALKPKMDLGAVAWRGEVKRIHRCWEKDFAKALAGWRKSGTRDQKGRSRQFGIWGLSLEGIAYLERVRRLLIRWTTHPRKAEETNRLEKNRPFAARLQRHIDALKEDRIKKAADAVVMAALGYITEGEERKEKFEPCSIILVEDLERYRFRTDRPRQENSKLMQWAHRALFREIARQAGIFGIAVGKVGAGFTSRFHAATGAPGLRCAAVTKGLLRKPWFLKRLEEDGLDASSIQVGDIIPWERGKLFCTIDRAGKPVMIQADINAAQNLQKRFWANYDEPFRVVCAAGAADTFVPLPGKRLARFFASKMLAAVKPGDSPAYELVQAKVGRVEKQAVEEEGSMREEFPERLHEEDEAASARKTIFFRDPSGALLPAIRWYESKVFWSQVKQKVRQALLRPRKTAVTL

SEQ ID NO: 61942 - protein, 1127 aa, Unknown
  Microbial Source - Ga0206102_1000160 | GENOME_ACESSION: 1B1Ametagenome_2_$F_3300020149 GENOME_ID: 20785 CONTIG_ID: 159
MPVRSIKLKLMTHSGDNAAMLRKALWQTHKLHNEGVAYYMKLLIMLRQRDVYKQDLKEPAESFRLDLLAHVRQQQQRNGSAHIVIPEMELTAALRELYELLVPSHNGGKGDSQQLSRAFLSPLTDPNSQGLEGTAKAGAKPRWQKMQAEGHPDWEAEKERAEREKEADPARKIMKQLREWGLKPLFSLFTNEQTHIQWAPAKKDRDFVRTWDRDMFQQALERLLSWEQWNHKVIEERALVIARREAYESEHFASEAQQAWLQRMRGYELERAAKLAEQSLGLTGPFRIKSRQLRGWKRVHDLWRKLDKKGQRSLDHCWEAVAKIQGAQPKDFGDPELYRFLAEPANHDLWLEEPERLFHLVTYNALLEKEELSKQQTTLTLPDAVEHPLWVRFDPKGGNLHSYELQSEDDKSPQKHLSVTFARLIWPDSTGDGTPLWIESGPIQVGLATSAQFYRQFRLLPMGDDNRLGKALEVQDYSAADTKTTGLLGGAKLQFERPYVEKHWQTVSEGDIGRAYFNVTIDMEPIQPMKNDRLISGLGKAFKTFKRDFMEVTQYKPADLEAWMATQPAKTELTGTKALQEGLRVISVDLGQRTAAAVSVFEVVRGKPDADKLFYPIRDTESLYAVHRRSHLLQLPGEAVTPEAVSERQSRNRAMYGIRMQVRLLSGILRLYGKEEAASRRKSITRTMDMIRSTDNLSMDDKTRWSSVYQRLADAAELDVPLWQSTVITAHRELEAIVSQAFSTWRTSSRHRGRGVGGKSMWSLEELDQTRKLLISWSKRAREPHAINRLDRNERFAQRLLTHLQRLKADRLKETANLIIMAALGYKYDSPEKGWLPVFPACQLILFEDLSRYRFKMDRSRSENSKLMNWAHRSIPREVYMQGQVFGLMVGHVPSEFTSRFHARTGAPGIRCHVVTQADLDGRTAMLKLVDQDFLAEVRDELQPGDLLPFRGGEIFVSLNGSTEKERALNRLHADINAAQNLQRRFWSRYPQDPIRISAQRITADQEIAYEPKTTKMKESMGKGFFQEFEISKSHHVYKWNSSGKLGGKKRIADSKDMEETDDLAEEAAAAEELMDGYVTLFRDPSGYYRASDLWVPQVDFWGMVTRRLESLLKAAINERPGRALSR

SEQ ID NO: 61943 - protein, 1101 aa, Unknown
  Microbial Source - Ga0207869_1001742 | GENOME_ACESSION: HigsolAR5DSPAdes_$F_3300025517 GENOME_ID: 27181 CONTIG_ID: 1741
MSVKSIKLKLKTRSGTNSLSLRKGLWKTHELMNQGIAYYMEWLTLLRQEPVGSRSKEELRQELIGRLQEQRKRNGYSDSATELPDEVFLLLRELYECIVPSSVGESGDAQLLSRKYLSPLTDPDSEGGEGKSKAGRKPGWLLKKEAGDPTWEAEFLRAQKRKEADPTPRIMQALREFGIKPLFPLFTNLQSDITWLPPANKKQFVRTWDRDMFQQAIEKLLSWESWNRRVKDEREKLEQRKAKFEQEYLQDADGWLAPLQQFEKDREKELAEVAFAPGSVYLITPRQIRGWEKLYEKWEKLNTTTEADYIARIAEVQSSMPKEFGDPVVFRFLAKAENHHIWKGHKDRLFLLASYNQIKKQLQQAKEQAAFTLPDPVEHPLWIRFDARDGNLHDYVLWQESKRTRSRRTVTFSSLIMPSENGWCEQANVEVELALSRQFYRQIELCDNPKGKQEITFKDYSSGIPLKGHLGGAKIQFDRCHLEKNRDTLAEGNVGPVYLNVTVDIQPSQEIKNGRLQSPLGQALKVLAKDWPKVTEYKPSELESWILQSGQLQQTGIQSLTSGMRVMTVDMGIRTSAAVSIFEAVKEPPANSKKLCYKLPHCELYAVHRRSFLLNMPGERPDRRVKEQREKRTAERYAIRSQIRLLAQVNRLYAKETVFEQKQAIDEMVDAIQRNKNLAESVRNTWVKELGRLSACAGYQQDVWEKEVSEVYKRLEYITGEIVGKWRRSFGKGRKNLAGLSLWNIEELDSLRKLLISWSKRSRRPGEVNRLQENEKFAVELLEHIRQVKDNRLKQMANLIVMTALGYVYDETQREWIEKYPACQLILFENLQRYRFKQDRSRKENSQLMKWAHRSIPKTVWMQGEPFGLQVGDVNSEFSSRFHAKTGAPGIRCHMLTEPETRDSFLKEMIVKKGFLNEQEVELLKAGDIIPMQGGELFVTLKEKAGEELLIVHADINAAQNLQRRFWHQNAEVFRVVCQAGKTAKGEEVYIPKYKLAEKHLGKGLFRKQSETEDEHVYIWDNKAKIKGKTLSDDSLELEDEDEGLESLEEAKEARGEYKTLFRDPSGFFFPQDTWRPQVEFWSIVKSRLEKRLKMMILQKR

SEQ ID NO: 61944 - protein, 1129 aa, Unknown
  Microbial Source Ga0209347_1001125 | GENOME_ACESSION: AutmicBR23SPAdes_$F_3300027640 GENOME_ID: 23478 CONTIG_ID: 1124-
MTVRSIKLKMKTQTDPESLQLRKALWKTHQLLNEGVAYYMYWLILLRQDSYINEEGREYKKEEIQKELLEKVSGQQKRNDWQGDLGSLDILIPLRKLYELIVPSSIGEKGDSQISARKYLSPLVDPDSQGGKGTAKSGRKPRWQKMKEDGNPEWEEEYKKDMTKKESDPTTSILTELENYGLKPLIPLFTEEIKDIAWLPRKRGFVRTWDRDMFQQAIERLLSWESWNIRVKEEKQKIEQAIEDYRNKYLQDGEEWISKLREIEKIREAEITDVSYATKQGYLITRRELKGWEKVYEKWSKLIDAPLYDLKKVVTDVQNSMRREFSSAIFNILAEKKNRDIWVGQPNRLLHFAAYNVLLRKLQKAKDQATLTLPDPVNHPLWIRYDARGGNIHSYTIFQVDKMEVKVNLERMVWPNDSTWIEKEDITVHLAPSEQLYRQIAVQDNPSGKQEIDFIDYSSRVPLKGELIGSKIQFDRRYLENHTEELLAGNIGPVYLNLGVEVKHYQEMKNGRLRTPIGQSFTVKSLEWQKVIGFKAKELAEWMEQTAETNEKGIDSITEGLRIMSIDMGIRTSATVSVFEVVKNQPDNNKLFYKIQDTDLFAVHCRSILLNLPGEQVSKDIIKERDERYTERRFIKSQIRLLSKILQLNNQETQDGRKNILIGMIDTIESNKSLLNDQKQAWISKFNILAKNAYLDQVGWKQKLIEIHHEIEPVVGKLVSEWRRSFSKNQKNNKNRKNLAGLSMWNIDELEDTRRTLSSWSNRTRNPGEPKPIDPKFGINLLTHIQNLKDDRLKQMANLIVMTALGYKYDPGEKQKEERWKKAYPACHVILFEDLSRYRFNLDRTRLENSKLMKWGHRSIPKMVQMQGEIYGLLVGDVYSAFSSRFHAKTGAPGIRCHSLDEEDVNMLKNVSEIGGFDKLEDFKDLKREYYKLFGSVDKDYLAKMIERSDLIKSGTIIPKEGGELFITLAGHYKSNPKLSIIHADINAAQNLQRRFWQSNSEIFRVSCKLVKMSDGEYYIPKYSSKTFEKAMGKGRFIKNLDSEVYKWGNSSKMRIKTISTDKEIEFEEMEDFEQALEDAQEIQDGFKTMFRDPSGFFLATDKWLPQKEFWSMVKTVIHSRLRESSFSK

SEQ ID NO: 61945 - protein, 1147 aa, Alicyclobacillus kakegawensis
MAVKSIKVKLRLSECPDILAGMWQLHRATNAGVRYYTEWVSLMRQEILYSRGPDGGQQCYMTAEDCQRELLRRLRNRQLHNGRQDQPGTDADLLAISRRLYEILVLQSIGKRGDAQQIASSFLSPLVDPNSKGGRGEAKSGRKPAWQKMRDQGDPRWVAAREKYEQRKAVDPSKEILNSLDALGLRPLFAVFTETYRSGVDWKPLGKSQGVRTWDRDMFQQALERLMSWESWNRRVGEEYARLFQQKMKFEQEHFAEQSHLVKLARALEADMRAASQGFEAKRGTAHQITRRALRGADRVFEIWKSIPEEALFSQYDEVIRQVQAEKRRDFGSHDLFAKLAEPKYQPLWRADETFLTRYALYNGVLRDLEKARQFATFTLPDACVNPIWTRFESSQGSNLHKYEFLFDHLGPGRHAVRFQRLLVVESEGAKERDSVVVPVAPSGQLDKLVLREEEKSSVALHLHDTARPDGFMAEWAGAKLQYERSTLARKARRDKQGMRSWRRQPSMLMSAAQMLEDAKQAGDVYLNISVRVKSPSEVRGQRRPPYAALFRIDDKQRRVTVNYNKLSAYLEEHPDKQIPGAPGLLSGLRVMSVDLGLRTSASISVFRVAKKEEVEALGDGRPPHYYPIHGTDDLVAVHERSHLIQMPGETETKQLRKLREERQAVLRPLFAQLALLRLLVRCGAADERIRTRSWQRLTKQGREFTKRLTPSWREALELELTRLEAYCGRVPDDEWSRIVDRTVIALWRRMGKQVRDWRKQVKSGAKVKVKGYQLDVVGGNSLAQIDYLEQQYKFLRRWSFFARASGLVVRADRESHFAVALRQHIENAKRDRLKKLADRILMEALGYVYEASGPREGQWTAQHPPCQLIILEELSAYRFSDDRPPSENSKLMAWGHRGILEELVNQAQVHDVLVGTVYAAFSSRFDARTGAPGVRCRRVPARFVGATVDDSLPLWLTEFLDKHRLDKNLLRPDDVIPTGEGEFLVSPCGEEAARVRQVHADINAAQNLQRRLWQNFDITELRLRCDVKMGGEGTVLVPRVNNARAKQLFGKKVLVSQDGVTFFERSQTGGKPHSEKQTDLTDKELELIAEADEARAKSVVLFRDPSGHIGKGHWIRQREFWSLVKQRIESHTAERIRVRGVGSSLD

SEQ ID NO: 61946 - protein, 1115 aa, Alicyclobacillus hesperidum
VTVRSIRVKLAVGSPQYRDVRRGLWKTHEIMNQGVRYYCEWLVLMRQEPIYDEDEHGLTVVQRTREDIQAELLSRLRTLQSAHQHSGDMGTDEELLSLMRQLYEQLVPSSVDKNKSGDARMIARNFFNPLTNPNSQGGLGISNAGRKPKWLLKKLSGDPTWEEDYKKAMEQKQESSVSFLLLELRRFGLHPIFLPYTDTVLEVSWAPKKARQWVRKWDYDLFQQSIERMLSWESWTRRVKERFEKLVESEKKFYDENFATDPEFIKLAETLEGELQASSQGFVAVDEHAFQIRPRSMRGFDRVADEWCKLADDAPIEEYEAAIKRVQARLGRNFGSYVLFAHLAKPEYWSLWRSDPTKILRFARLRALQRAVARAKRHARLTLPDAIHHPIWIRYDAKGKNIYSYRLLIPEKRSKRYYVEFSSLIMPDGENRWAEHRNIRVPLAFSRQWERLHFSIMEDGSLCVQYRDPGVDEPLRAELGGAKIQFDRRYLIRRSSTLSAGECGPVYLNVSVDVNPAHRPDVQVLQSAKLVSVSRDTNRIYLRPENLSAYWKSQGDGTLPLRVMSVDLGVRSSAAVVICRLEHRDSVVSSGRRTATIYRIAGTDEFVAVQERAFLLRLPGEGKGTNEDAPLRDVYAQLGTIRQGIQILRSLLRLCDTKTPDERQEALHGLAQSLEPSGAWKDELHPHLVMLQGVVHDSVDNWKQKVISVHRQMERILGHAVREWKVARKNAGKPPIRRGAGGLSLRRIRQLEQERRTLVAWSNHAREPGQVVRIKRGTQVAQWLVERVNHLKEDRLKKLADLLIMTALGYVYDETKPSGHKWDKRYPPCQIILMEDLSRYRFQSDRPPSENSQLMAWSHRRLLEILKLQADLHKLIVGTVFPAFSSRFDAQSGAPGVRCRSVKKQDIENAAQGKGWLARELQRLNWTLEWLQPNDLIPTGDGELFVTPACCDRQKGIKIVHADLNAAQNLQRRFWGGHAESLCRVTCDVVERDGRRYAVPRISNAFADSFYKVFGQGVFVSTDEEDVYRWMVGEKISSRGRSRGRTSDEEAEAETWIDEAREQQGKVIALFRDASGQIHGGDWLVAKVFWGWVERLVTARLLSRMSEREAAAHKE

SEQ ID NO: 61947 - protein, 1463 aa, Unknown
  Microbial Source - GENOME_ACESSION: OQOO01.1 GENOME_ID: 9995 CONTIG_ID: 420
MPKQDKPSVTQRAYTLRLRGADPSDTSWRDALWRTHEAVNKSAKAFGDWLLTLRGGLDHTLADARVKGGKGKPDRDPADAERKARRILLALSWLSVESKLGAPEGYIVASGEEAPENRNGKVVAALEEILKNRNLADNEIGEWKKDCSSSLSAAIRGDAVWVNRSKAFDEAVKSIGCSLTRDEVWDMLERFFGSRDAYLAPAKGSEDESSETEQGNKAKDLVQKAGQWLSSRFGTGKGADFCRMADVYGKIAAWAGANKSNGSATVDDLAKELQKELQIEESKATDGLDWIIKLSSYPGHSPNPVHELLRQNPKLARSNLDDLEKTANTRAESCRSKIGSKGQRPYSDAVLKDVEAVCEFTYLQKDGPARHSEFTVILDHAARRVSLAHTWIKRAEKERSKFEEDAKKIGQVPKAAKDWLHKFCTERSQASGALEPYRIRRRAVDGWKEVVAAWSERSCNTSADRIAAARALQDDPEIDKFGDIQLFEALAEDDAACVWHKDGDAAKAPDPQPLIDYALAAEAEFRKRHFKVPAYRHPDALLHPVFTDFGESRWKICFDVHENLETASPHALSLKLWTGSEVVPVPLRWQSKRLARDLALGQDAQKDGALEVARADRLGRAASNVTKSDEVKISGLFEQADWNGRLQAPRRQLEAIAVVRDNLSLSDQERERRMSGMMDRIRWLVTFSAKLQPQGPWYEFAKTNQLRIDLQDWPHADSNKTRKGHARLILSRLPGLRVLSVDLGHRYAAACAVWEAVNAEQVEEACKDAGHEAPNANDLYLHLKRKATKKQKKDKKIEVEKTTIYRRIGADTLPNGTPHPAPWARLDRQFLIKLQGEKEGVREASNEEVWKVHQLETELGRTTPLIDRLVASRWGGSDKQIARLEELKKLGWNSAEKSDPNGESDEGESRRPSLSVDELMSSAVRTMRLALKRHGDRARIAHYLITDEKTKPGGTKEKLDESGRVDLLQDALVMWHDLFSSHGWEDKAAGQLWGEHVAKLSEYKAPEEIDEGSSVIERKKKQKENREKLYDVAEALAQDETLRKALHDAWKKRWEEDDEQWKKRLRWFKDWILPRGKAANDPAIRKVGGLSLPRLATLTEFRRKVQVGFFTRLHPDGTRAEAKEQFGQKTLDALEHLREQRVKQLASRITEAALGIGSEGGKGWDGGKRPRQRIDDPRFAPCHAIVIEDLTRYRPEETRTRRENRQLMSWSSSKVKKYLAEACQLHGLHLREVSASYTSRQDSRTGAPGIRCQDVPVDEFMRSPFWRHQIAQAEKKQSGGKGDARERFLCDLNARWKDKSEADWKKAGAVRVPLKGGEIFVSADPASLAAKGLQADLNAAANIGLRALIDPDWPGKWWYVPCDPVSFRPIKDKVAGSAAVKLDQALRQPAQAQSGDAKAKKKREKKDAGKPQEVVNLWRDISSSPLGESGEWKEYAAYRNQVQVRVVDILRRAVCSKNNREKQ

SEQ ID NO: 61948 - protein, 1122 aa, Unknown
  Microbial Source - GENOME_ACCESSION: OWPA01.1 GENOME_ID: 12159 CONTIG_ID: 246
MTNSDSVELRKGLWATHELLNKGVAYYMEWLILLRQDTIKMPEGVIKPKEAIQSELLQRVKAQQLLNNHQDKAEEESEVLAVLRQLYELIVPSSVGGTGDAQMLARKFLSPLVDPNSEGGKGTSKAGRKPRWKILKEQGDPRWEEEYEKDCARKEADETSKVLFKLEELGLKPLFPLFTDTRKDINWLPKANRQFVRNWDRDMFQQAVERLLSWESWNRRVADAKSKLEEKATEYYDKYLSSVTETVQKLKRYERERAVELEQTTGNKSDSYRISIRSVRGWDRIYPLWLKRSVNATPTELRDILKSVQREMSEGFGDPQLFIYLAQPENRDIWYGSNEKARILNHYAIYNGILTKLEQAKEQATFTMPDPIDHPLWVRFDARGGNLYTYILEEDEGWRVQFERLLWPNERGWEEREKVNVKVAPSKQLVRKAKNGYQKIIELVNNPKGKQEVIYRDYSTMLPFDGVLGGAKIQLNRYYLEKSKEKIARGQIGSVYLNISLEVTPIQEVKNGRLQTPLGKALTIVKSDWPKIVDFKSEQLQQMLTEQNSNKGDLKGVRSLAEGLRVMTIDLGQRASAAVSIFEVTAERPSDEKTKLFFAIPDTPLYAVHRRSLLLNLPGESPDKETEQRRKDRYSSYRAIRFQVRMLAQILKLHTKETSEERLTELQSFLKAVTEYELWDDEIKSLWKQELNKLRKSVNQSNEEWVQEIVLTHRSLESRVAKNISNWRKSLSNKRGGFLANSRYKIAGLSLWNVDDLTRNRRLLLSWSKRSRIPGKMNHLQHEERFGLHQLVHLQNVKNDRLKQLANLIVMTALGYTYDQERKVWLETYPACQVILFEDLSRYRFKLDRPRRENSQLMKWAHRSIPKTVAMQGEIYGLQVGDVYAAFSSRFHARTGTPGIRCKQLKECDLNDSFIKEALIRDKFITEEKWSSLKAGDIVPWKGGELFATLEKNASDKNGSKLLLIHADINAAQNLQRRFWNHRSELFRIACRRTKINDGEVYVPTSQSERWKKQMGKGYFVKDNNYSGRDNELEKVEAYEWNNMERIRQEVVSIDETIELEDMEEINQAIEEELESKGDYVTLFRDPSGVIFPDYLWIPQVQFWSVVKNKIQKELHKRIFGN

SEQ ID NO: 61949 - protein, 1112 aa, Bacillus sp.
MAIRSIKLKMKTNSGTDSIYLRKALWRTHQLINEGIAYYMNLLTLYRQEAIGDKTKEAYQAELINIIRNQQRNNGSSEEHGSDQEILALLRQLYELIIPSSIGESGDANQLGNKFLYPLVDPNSQSGKGTSNAGRKPRWKRLKEEGNPDWELEKKKDEERKAKDPTVKIFDNLNKYGLLPLFPLFTNIQKDIEWLPLGKRQSVRKWDKDMFIQAIERLLSWESWNRRVADEYKQLKEKTESYYKEHLTGGEEWIEKIRKFEKERNMELEKNAFAPNDGYFITSRQIRGWDRVYEKWSKLPESASPEELWKVVAEQQNKMSEGFGDPKVFSFLANRENRDIWRGHSERIYHIAAYNGLQKKLSRTKEQATFTLPDAIEHPLWIRYESPGGTNLNLFKLEEKQKKNYYVTLSKIIWPSEEKWIEKENIEIPLAPSIQFNRQIKLKQHVKGKQEISFSDYSSRISLDGVLGGSRIQFNRKYIKNHKELLGEGDIGPVFFNLVVDVAPLQETRNGRLQSPIGKALKVISSDFSKVIDYKPKELMDWMNTGSASNSFGVASLLEGMRVMSIDMGQRTSASVSIFEVVKELPKDQEQKLFYSINDTELFAIHKRSFLLNLPGEVVTKNNKQQRQERRKKRQFVRSQIRMLANVLRLETKKTPDERKKAIHKLMEIVQSYDSWTASQKEVWEKELNLLTNMAAFNDEIWKESLVELHHRIEPYVGQIVSKWRKGLSEGRKNLAGISMWNIDELEDTRRLLISWSKRSRTPGEANRIETDEPFGSSLLQHIQNVKDDRLKQMANLIIMTALGFKYDKEEKDRYKRWKETYPACQIILFENLNRYLFNLDRSRRENSRLMKWAHRSIPRTVSMQGEMFGLQVGDVRSEYSSRFHAKTGAPGIRCHALTEEDLKAGSNTLKRLIEDGFINESELAYLKKGDIIPSQGGELFVTLSKRYKKDSDNNELTVIHADINAAQNLQKRFWQQNSEVYRVPCQLARMGEDKLYIPKSQTETIKKYFGKGSFVKNNTEQEVYKWEKSEKMKIKTDTTFDLQDLDGFEDISKTIELAQEQQKKYLTMFRDPSGYFFNNETWRPQKEYWSIVNNIIKSCLKKKILSNKVEL

SEQ ID NO: 61950 - protein, 1108 aa, Brevibacillus agri
MAIRSIKLKLKTHTGPEAQNLRKGIWRTHRLLNEGVAYYMKMLLLFRQESTGERPKEELQEELICHIREQQQRNQADKNTQALPLDKALEALRQLYELLVPSSVGQSGDAQIISRKFLSPLVDPNSEGGKGTSKAGAKPTWQKKKEANDPTWEQDYEKWKKRREEDPTASVITTLEEYGIRPIFPLYTNTVTDIAWLPLQSNQFVRTWDRDMLQQAIERLLSWESWNKRVQEEYAKLKEKMAQLNEQLEGGQEWISLLEQYEENRERELRENMTAANDKYRITKRQMKGWNELYELWSTFPASASHEQYKEALKRVQQRLRGRFGDAHFFQYLMEEKNRLIWKGNPQRIHYFVARNELTKRLEEAKQSATMTLPNARKHPLWVRFDARGGNLQDYYLTAEADKPRSRRFVTFSQLIWPSESGWMEKKDVEVELALSRQFYQQVKLLKNDKGKQKIEFKDKGSGSTFNGHLGGAKLQLERGDLEKEEKNFEDGEIGSVYLNVVIDFEPLQEVKNGRVQAPYGQVLQLIRRPNEFPKVTTYKSEQLVEWIKASPQHSAGVESLASGFRVMSIDLGLRAAAATSIFSVEESSDKNAADFSYWIEGTPLVAVHQRSYMLRLPGEQVEKQVMEKRDERFQLHQRVKFQIRVLAQIMRMANKQYGDRWDELDSLKQAVEQKKSPLDQTDRTFWEGIVCDLTKVLPRNEADWEQAVVQIHRKAEEYVGKAVQAWRKRFAADERKGIAGLSMWNIEELEGLRKLLISWSRRTRNPQEVNRFERGHTSHQRLLTHIQNVKEDRLKQLSHAIVMTALGYVYDERKQEWCAEYPACQVILFENLSQYRSNLDRSTKENSTLMKWAHRSIPKYVHMQAEPYGIQIGDVRAEYSSRFYAKTGTPGIRCKKVRGQDLQGRRFENLQKRLVNEQFLTEEQVKQLRPGDIVPDDSGELFMTLTDGSGSKEVVFLQADINAAHNLQKRFWQRYNELFKVSCRVIVRDEEEYLVPKTKSVQAKLGKGLFVKKSDTAWKDVYVWDSQAKLKGKTTFTEESESPEQLEDFQEIIEEAEEAKGTYRTLFRDPSGVFFPESVWYPQKDFWGEVKRKLYGKLRERFLTKAR

SEQ ID NO: 61951 - protein, 1108 aa, Brevibacillus gelatini
MAIRSIKLKLKTNTGPEAQNLRKGIWRTHRLLNEGVAYYMNMLLLFRQESTDKKTKQEIHEELIRHIRAQQQRNHADEKTQALPLEKALEALRKLYELLVPSSVGQSGDSQIISRKFLSPLVDPNSEGGKGTSKAGAKPAWQKKKEANDPTWKQDYEKWKKRREEDPTASVITTLEEYGIRPLFPLYTNTVAEIAWLPLKSGQFVRTWDRDMFQQAIEGMLSWESWNRRVQEEYAKLEGKMAQLNEQLEGGEEWIRLLEQYEEKREQELRENMTAANDKFRITKRQMKGWKELYEVWSTFLPSASQEQYKEAIKRVQQRLRGKFGDFHFFQYLSEEENRLIWKGNPQRIHYFVARNELTKKLEKAKQSARRTLPDANKHPLWVRYDARGGNLQDYYLTAESDKPRSRRFVTFSQLIWPSESGWLEKKDVQAELALSRQFYQQVTFLKNDKGKQEIEFKDKGSGTTFSGHLGGAKLQLERSVLENKERKFEEGEIGKAYLNVAIDFKPLQEVKNGRVQAPYGQVLQLIRLPNAFPKVRTYKSEELVEWIKASPQHLSGVESLASGFRVMSIDLGLRAAAATSIFSVEESSDKNATKLAYWIEGTPLVAVHQRSYMLRLPGEQVEQHVWEKRDERGDQHKRVRFQIRRLAEIIRLANKQYGDRWDELNRLDEAVSKEKSPLDQADRTFWEGIVSDLTTALPLNDADWTEAVVQIHRKAELYVGKVVQAWRKRFNADERKGIAGLSMWSIEELDGLRKLLISWSRRTRNPQEVNRFEPEHTGHKRLLTHIQNVKKDRLKQVSHAIVMTALGYIYDEKKQKWCAKYPACQVILFENLSQYRSNLDRSAKENSTLMKWAHRSIPKYVHMQAEPYGIQIGDVRAEYSSRYYAKTGTPGIRCKKLREHDVKGWRLDHLKKRLVNEQFLTEAQVEQLKAGDIIPDDSGELFMTMTDGSGGKEIVFLQADINAAQNLQKRFWQRNSELFKVSCRVIVRDEAEYLVPQAKKVQEKLGKGVFVKKSDTAWKEVYVWDSQAKLKGKTTFTEESESPEQLEDLQEMIEEAEEAKGTYRTLFRDPSGVFFPDFVWNTPKDFWGEVKRKLYGKLRERLLTKVR

SEQ ID NO: 61952 - protein, 1129 aa, Unknown; identical to SEQ ID NO: 61900
  AacCas12b

SEQ ID NO: 61953 - protein, 1129 aa, Unknown
  AapCas12b
MAVKSMKVKLRLDNMPEIRAGLWKLHTEVNAGVRYYTEWLSLLRQENLYRRSPNGDGEQECYKTAEECKAELLERLRARQVENGHCGPAGSDDELLQLARQLYELLVPQAIGAKGDAQQIARKFLSPLADKDAVGGLGIAKAGNKPRWVRMREAGEPGWEEEKAKAEARKSTDRTADVLRALADFGLKPLMRVYTDSDMSSVQWKPLRKGQAVRTWDRDMFQQAIERMMSWESWNQRVGEAYAKLVEQKSRFEQKNFVGQEHLVQLVNQLQQDMKEASHGLESKEQTAHYLTGRALRGSDKVFEKWEKLDPDAPFDLYDTEIKNVQRRNTRRFGSHDLFAKLAEPKYQALWREDASFLTRYAVYNSIVRKLNHAKMFATFTLPDATAHPIWTRFDKLGGNLHQYTFLFNEFGEGRHAIRFQKLLTVEDGVAKEVDDVTVPISMSAQLDDLLPRDPHELVALYFQDYGAEQHLAGEFGGAKIQYRRDQLNHLHARRGARDVYLNLSVRVQSQSEARGERRPPYAAVFRLVGDNHRAFVHFDKLSDYLAEHPDDGKLGSEGLLSGLRVMSVDLGLRTSASISVFRVARKDELKPNSEGRVPFCFPIEGNENLVAVHERSQLLKLPGETESKDLRAIREERQRTLRQLRTQLAYLRLLVRCGSEDVGRRERSWAKLIEQPMDANQMTPDWREAFEDELQKLKSLYGICGDREWTEAVYESVRRVWRHMGKQVRDWRKDVRSGERPKIRGYQKDVVGGNSIEQIEYLERQYKFLKSWSFFGKVSGQVIRAEKGSRFAITLREHIDHAKEDRLKKLADRIIMEALGYVYALDDERGKGKWVAKYPPCQLILLEELSEYQFNNDRPPSENNQLMQWSHRGVFQELLNQAQVHDLLVGTMYAAFSSRFDARTGAPGIRCRRVPARCAREQNPEPFPWWLNKFVAEHKLDGCPLRADDLIPTGEGEFFVSPFSAEEGDFHQIHADLNAAQNLQRRLWSDFDISQIRLRCDWGEVDGEPVLIPRTTGKRTADSYGNKVFYTKTGVTYYERERGKKRRKVFAQEELSEEEAELLVEADEAREKSVVLMRDPSGIINRGDWTRQKEFWSMVNQRIEGYLVKQIRSRVRLQESACENTGDI

SEQ ID NO: 61954 - protein, 1090 aa, Unknown
  BrCas12b
MPVRSFKVKLVTRSGDAEHMLQLRRGLWKTHEIVNQGIAYYMNKLALMRQEPYAGKSREVVRLELLHSLRAQQKRNNWTGDAGTDDEILNLSRRLYELLVPSAIGEKGDAQMLSRKFLSPLVDPNSEGGKGTAKSGRKPRWMKMREEGHPDWEAEREKDRAKKAADPTASILNDLEAFGLRPLFPLFTDEQKGIQWLPKQKRQFVRTFDRDMFQQALERMLSWESWNRRVAEEYQKLQAQRDELYAKYLADGGAWLEALQSFEKQREVELAEESFAAKSEYLITRRQIRGWKQVYEKWSQLPEHAAQEQFWQVVADVQTSLPGAFGDPKVYQFLSQPEHHHIWRGYPNRLFHYSDYNGVRKKLQRARHDATFTLPDPVEHPLWIRFDARGGNIHDYEISQNGKQYQVTFSRLLWPENETWVERENVTVAIGASQQLKRQIRLDGYADKKQKVRYRDYSSGIELTGVLGGAKIQFDRRHLRKASNRLADGETGPVYLNVVVDIEPFLAMRNGRLQTPIGQVLQVNTKDWPKVTGYKPAELISWIQNSPLAVGTGVNTIEAGMRVMSVDLGQRSAAAVSIFEVMRQKPAEQETKLFYPIAVTGLYAVHRRSLLLRLPGEKISDEIEQQRKIRAHARSLVRYQIRLLADVLRLHTRGTAEQRRAKLDELLATLQTKQELDQKLWQTELEKLFDYIHEPAERWQQALVAAHRTLEPVIGQAVRHWRKSLRIDRKGLAGMSMWNIEELEETRKLLIAWSKHSRVPGEPNRLDKEETFAPQQLQHIQNVKDDRLKQMANLLVMTALGYKYDEAEKQWKEAYPACQMILFEDLSRYRFALDRPRRENNRLMKWAHRSIPRLVYLQGELFGIQVGDVYSAYTSRFHAKTGAPGIRCHALKEEDLQPNSYVVKQLIKDGFIREDQTGSLKPGQIVPWSGGELFVTLADRSGSRLAVIHADINAAQNLQKRFWQQNTEIFRVPCKVTTSGLIPAYDKMKKLFGKGYFAKINQTDTSEVYVWEHSAKMKGKTTPADPAEEGVFDESLTDEMEELEDSQEGYKTLFRDPSGFFWSSDRWLPQKEFWFWVKRRIEKKLREQLQ

SEQ ID NO: 61955 - protein, 318 aa, Unknown
  Microbial Source - Accession No. GA0272445_1000517
MLRRCEEEVVKFLNLSRLELQKMLYHKMKDAGVETSAYTLALLVQRFTGSLGEKAVIPFDTSYNAKFVSEDGVWFVEVQLLKGRGRRVRIPVAKTELPYYEALEELKDLPFIIVRENKDWFAYVSIPVQNSVNGEIVGVDFNLRRWVASPFEGPPLFFDAGEYMRGIDRLQRLRSRYQRRGEEDKWNECYREMRGIVKLAHGNFLARIREKYGVCTLAVEEVEVMYKLIRKDNKMINNWLYSKTALRQFTLRAMAKGFNVVEVDPKDTTKLCHKCGGQVKIYGKHDRLITCEKCGYKDYNRDLNSARNIAKKAQYVKE

SEQ ID NO: 61956 - protein, 1129 aa, Alicyclobacillus sp.; identical to SEQ ID NO: 61953

SEQ ID NO: 61957 - DNA, 91 bp, Artificial Sequence
  Synthetic
gtctagaggacagaatttttcaacgggtgtgccaatggccactttccaggtggcaaagcccgttgagcttctcaaatctgagaagtggcac

SEQ ID NO: 61958 - DNA, 91 bp, Artificial Sequence
  Synthetic
gtctaaaggacagaatttttcaacgggtgtgccaatggccactttccaggtggcaaagcccgttgaacttctcaaatctgagaagtggcac

SEQ ID NO: 61959 - DNA, 91 bp, Artificial Sequence
  Synthetic
gtctagaggacagaatttttcaacgggtgtgccaatggccactttccaggtggcaaagcccgttgaacttctcaaatctgagaagtggcac

SEQ ID NO: 61960 - DNA, 91 bp, Artificial Sequence
  Synthetic
gtctaaaggacagaatttttcaacgggtgtgccaatggccactttccaggtggcaaagcccgttgagcttctcaaatctgagaagtggcac

SEQ ID NO: 61961 - DNA, 91 bp, Artificial Sequence
  Synthetic
gtctagaggacagaatttttcaacgggtgtgccaatggccactttccaggtggcaaagcccgttgaacttctcaaatctgcgaagtggcac

SEQ ID NO: 61962 - DNA, 91 bp, Artificial Sequence; identical to SEQ ID NO: 61957
  Synthetic

SEQ ID NO: 61963 - protein, 1090 aa, Artificial Sequence; identical to SEQ ID NO: 61954
  Alicyclobacillus sp.

SEQ ID NO: 61964 - DNA, 125 bp, Artificial Sequence
  Synthetic
tgcaggttagtggaaatatagatagccgttgtgactgagtgacgtgttaggtcaccgtagcacatgacacaactgcactggtcagcctgtagctaaccaccttcattatatctagtttttccaac

SEQ ID NO: 61965 - DNA, 98 bp, Artificial Sequenc
  Synthetic
gttgtgactgagtgacgtgttaggtcaccgtagcacatgacacaactgcactggtcagcctgtagctaaccaccttcattatatctagtttttccaac

SEQ ID NO: 61966 - DNA, 61 bp, Artificial Sequence
  Synthetic
tgacacaactgcactggtcagcctgtagctaaccaccttcattatatctagtttttccaac

SEQ ID NO: 61967 - DNA, 99 bp, Artificial Sequence
  Synthetic
gaaggtggttagctacaggctgaccagtgcagttgtgtcatgtgctacggtgacctaacacgtcactcagtcacaacggctatctatatttccactaac

SEQ ID NO: 61968 - DNA, 120 bp, Artificial Sequence
  Synthetic
gttggaaaaactagatataatgaaggtggttagctacaggctgaccagtgcagttgtgtcatgtgctacggtgacctaacacgtcactcagtcacaacggctatctatatttccactaac

SEQ ID NO: 61969 - DNA, 73 bp, Artificial Sequence
  Synthetic
gtgcagttgtgtcatgtgctacggtgacctaacacgtcactcagtcacaacggctatctatatttccactaac

SEQ ID NO: 61970 - DNA, 63 bp, Artificial Sequence
  Synthetic
  misc_feature (37)..(63): n = any nucleotide
gtccgtttcgttagtggaaatgtagatggttagcacnnnnnnnnnnnnnnnnnnnnnnnnnnn

SEQ ID NO: 61971 - DNA, 52 bp, Artificial Sequence
  Synthetic
  misc_feature (26)..(52): any n = any nucleotide
tagtggaaatgtagatggttagcacnnnnnnnnnnnnnnnnnnnnnnnnnnn

SEQ ID NO: 61972 - DNA, 54 bp, Artificial Sequence
  Synthetic
  misc_feature (28)..(54): Any n = any nucleotide
gttagtggaaatctagatggttagcacnnnnnnnnnnnnnnnnnnnnnnnnnnn

SEQ ID NO: 61973 - RNA, 25 nt, Artificial Sequence
  Synthetic
gggaacaaagcugaaguacuuaccc

SEQ ID NO: 61974 - DNA, 18 bp, Artificial Sequence
  Synthetic
gggtagggcgggttggga

SEQ ID NO: 61975 - RNA, 12 nt, Artificial Sequence
  Synthetic
  misc_feature (1)..(1): Biotin tag = /5Biosg/
  misc_feature (12)..(12): Iowa black quencher = /3IAbRQSp/
ucucguacguuc

SEQ ID NO: 61976 - RNA, 24 nt, Artificial Sequence
  Synthetic
  misc_feature (1)..(1): biotin tag = /5Biosg/
  misc_feature (24)..(24): Iowa black quencher = 3IAbRQSp
ucucguacguucucucguacguuc

SEQ ID NO: 61977 - DNA, 55 bp, Artificial Sequence
  Synthetic
gaaattaatacgactcactatagggaggtttcaaactttacttgctttacataga

SEQ ID NO: 61978 - DNA, 30 bp, Artificial Sequence
  Synthetic
tcctaggttgaagataacccacataataag

SEQ ID NO: 61979 - RNA, 64 nt, Artificial Sequence
  Synthetic
gauuuagacuaccccaaaaacgaaggggacuaaaacgcagcaccagcuguccaaccugaagaag

SEQ ID NO: 61980 - DNA, 55 bp, Artificial Sequence
  Synthetic
gaaattaatacgactcactatagggcgaagttgtaggagacattatacttaaacc

SEQ ID NO: 61981 - DNA, 31 bp, Artificial Sequence
  Synthetic
tagtaagactagaattgtctacataagcagc

SEQ ID NO: 61982 - RNA, 64 nt, Artificial Sequence
  Synthetic
gauuuagacuaccccaaaaacgaaggggacuaaaacccaaccucuucuguaauuuuuaaacuau

SEQ ID NO: 61983 - DNA, 18 bp, Artificial Sequence
  Synthetic
gctgctgaggcttctaag

SEQ ID NO: 61984 - DNA, 21 bp, Artificial Sequence
  Synthetic
gcgtcaatatgcttattcagc

SEQ ID NO: 61985 - DNA, 40 bp, Artificial Sequence
  Synthetic
gcggccaatgtttgtaatcagtagacgtggtccagaacaa

SEQ ID NO: 61986 - DNA, 39 bp, Artificial Sequence
  Synthetic
tcagcgttcttcggaatgtcgctgtgtaggtcaaccacg

SEQ ID NO: 61987 - DNA, 22 bp, Artificial Sequence
  Synthetic
ccttgtctgattagttcctggt

SEQ ID NO: 61988 - DNA, 18 bp, Artificial Sequence
  Synthetic
tggcatggaagtcacacc

SEQ ID NO: 61989 - RNA, 111 nt, Artificial Sequence
  Synthetic
gucuagaggacagaauuuuucaacgggugugccaauggccacuuuccagguggcaaagcccguugagcuucucaaaucugagaaguggcaccgaagaacgcugaagcgcug

SEQ ID NO: 61990 - protein, 1129 aa, Alicyclobacillus acidiphilus; identical to SEQ ID NO: 61953

SEQ ID NO: 61991 - protein, 6 aa, Artificial Sequence
  Synthetic
  MISC_FEATURE (3)..(3): Xaa is R, S, D, E, Q, N, G, Y, or H
  MISC_FEATURE (4)..(4): Xaa is I, S, T, V, or L
  MISC_FEATURE (5)..(5): Xaa is L, F, N, Y, V, I, S, D, E, or A
RNXXXH

SEQ ID NO: 61992 - protein, 6 aa, Artificial Sequence
  Synthetic
  MISC_FEATURE (3)..(3): Xaa is R, S, D, E, Q, N, G, Y, or H
  MISC_FEATURE (4)..(4): Xaa is I, S, T, V, or L
  MISC_FEATURE (5)..(5): Xaa is L, F, N, Y, V, I, S, D, E, or A
RHXXXH

SEQ ID NO: 61993 - protein, 6 aa, Artificial Sequence
  Synthetic
  MISC_FEATURE (3)..(3): Xaa is R, S, D, E, Q, N, G, Y, or H
  MISC_FEATURE (4)..(4): Xaa is I, S, T, V, or L
  MISC_FEATURE (5)..(5): Xaa is L, F, N, Y, V, I, S, D, E, or A
RKXXXH

SEQ ID NO: 61994 - DNA, 91 bp, Alicyclobacillus acidoterrestris; identical to SEQ ID NO: 61957

SEQ ID NO: 61995 - protein, 1129 aa, Alicyclobacillus acidiphilus; identical to SEQ ID NO: 61953

SEQ ID NO: 61996 - protein, 1090 aa, Brevibacillus sp.; identical to SEQ ID NO: 61954

SEQ ID NO: 61997 - DNA, 125 bp, Artificial Sequence; identical to SEQ ID NO: 61964
  Synthetic

SEQ ID NO: 61998 - DNA, 98 bp, Artificial Sequence; identical to SEQ ID NO: 61965
  Synthetic

SEQ ID NO: 61999 - DNA, 61 bp, Artificial Sequence; identical to SEQ ID NO: 61966
  Synthetic

SEQ ID NO: 62000 - DNA, 99 bp, Artificial Sequence; identical to SEQ ID NO: 61967
  Synthetic

SEQ ID NO: 62001 - DNA, 120 bp, Artificial Sequence; identical to SEQ ID NO: 61968
  Synthetic

SEQ ID NO: 62002 - DNA, 73 bp, Artificial Sequence; identical to SEQ ID NO: 61969
  Synthetic

SEQ ID NO: 62003 - DNA, 63 bp, Artificial Sequence; identical to SEQ ID NO: 61970
  Synthetic
  misc_feature (37)..(63): n is a, c, g, or t

SEQ ID NO: 62004 - DNA, 52 bp, Artificial Sequence; identical to SEQ ID NO: 61971
  Synthetic
  misc_feature (26)..(52): n is a, c, g, or t

SEQ ID NO: 62005 - DNA, 54 bp, Artificial Sequence; identical to SEQ ID NO: 61972
  Synthetic
  misc_feature (28)..(54): n is a, c, g, or t

SEQ ID NO: 62006 - DNA, 91 bp, Artificial Sequence; identical to SEQ ID NO: 61957
  Synthetic

SEQ ID NO: 62007 - DNA, 91 bp, Artificial Sequence; identical to SEQ ID NO: 61958
  Synthetic

SEQ ID NO: 62008 - DNA, 91 bp, Artificial Sequence; identical to SEQ ID NO: 61959
  Synthetic

SEQ ID NO: 62009 - DNA, 91 bp, Artificial Sequence; identical to SEQ ID NO: 61960
  Synthetic

SEQ ID NO: 62010 - DNA, 91 bp, Artificial Sequence; identical to SEQ ID NO: 61961
  Synthetic

SEQ ID NO: 62011 - DNA, 91 bp, Artificial Sequence; identical to SEQ ID NO: 61957
  Synthetic

SEQ ID NO: 62012 - DNA, 21 bp, Artificial Sequence
  Synthetic
gggaacaaagcgaagacaccc

SEQ ID NO: 62013 - DNA, 18 bp, Artificial Sequence
  Synthetic
gggtagggcgggttggga

SEQ ID NO: 62014 - RNA, 12 nt, Artificial Sequence
  Synthetic
  misc_feature (1)..(1): Biotin tag /5Biosg/
  misc_feature (12)..(12): Iowa black quencher /3IAbRQSp/
ucucguacguuc

SEQ ID NO: 62015 - RNA, 24 nt, Artificial Sequence
  Synthetic
  misc_feature (1)..(1): Biotin tag /5Biosg/
  misc_feature (1)..(24): Iowa black quencher /3IAbRQSp/
ucucguacguucucucguacguuc

SEQ ID NO: 62016 - DNA, 55 bp, Artificial Sequence; identical to SEQ ID NO: 61977
  Synthetic

SEQ ID NO: 62017 - DNA, 30 bp, Artificial Sequence; identical to SEQ ID NO: 61978
  Synthetic

SEQ ID NO: 62018 - RNA, 64 nt, Artificial Sequence; identical to SEQ ID NO: 61979
  Synthetic

SEQ ID NO: 62019 - DNA, 55 bp, Artificial Sequence; identical to SEQ ID NO: 61980
  Synthetic

SEQ ID NO: 62020 - DNA, 31 bp, Artificial Sequence; identical to SEQ ID NO: 61981
  Synthetic

SEQ ID NO: 62021 - RNA, 64 nt, Artificial Sequence; identical to SEQ ID NO: 61982
  Synthetic

SEQ ID NO: 62022 - DNA, 18 bp, Artificial Sequence
  Synthetic
gctgctgaggcttctaag

SEQ ID NO: 62023 - DNA, 21 bp, Artificial Sequence
  Synthetic
gcgtcaatatgcttattcagc

SEQ ID NO: 62024 - DNA, 40 bp, Artificial Sequence; identical to SEQ ID NO: 61985
  Synthetic

SEQ ID NO: 62025 - DNA, 39 bp, Artificial Sequence; identical to SEQ ID NO: 61986
  Synthetic

SEQ ID NO: 62026 - DNA, 22 bp, Artificial Sequence
  Synthetic
ccttgtctgattagttcctggt

SEQ ID NO: 62027 - DNA, 18 bp, Artificial Sequence
  Synthetic
tggcatggaagtcacacc

SEQ ID NO: 62028 - RNA, 111 nt, Artificial Sequence; identical to SEQ ID NO: 61989
  Synthetic

SEQ ID NO: 62029 - RNA, 59 nt, Artificial Sequence
  Synthetic
gcaaagcccguugagcuucucaaaucugagaaguggcaccgaagaacgcugaagcgcug

SEQ ID NO: 62030 - protein, 1129 aa, Alicyclobacillus acidophilus; identical to SEQ ID NO: 61953

SEQ ID NO: 62031 - protein, 1129 aa, Alicyclobacillus acidoterrestris; identical to SEQ ID NO: 61900

SEQ ID NO: 62032 - protein, 1129 aa, Artificial Sequence; identical to SEQ ID NO: 61953
  Synthetic

SEQ ID NO: 62033 - protein, 1109 aa, Artificial Sequence
  Synthetic
MPVRSFKVKLVTRSGDAEHMLQLRRGLWKTHEIVNQGIAYYMNKLALMRQEPYAGKSREVVRLELLHSLRAQQKRNNWTGDAGTDDEILNLSRRLYELLVPSAIGEKGDAQMLSRKFLSPLVDPNSEGGKGTAKSGRKPRWMKMREEGHPDWEAEREKDRAKKAADPTASILNDLEAFGLRPLFPLFTDEQKGIQWLPKQKRQFVRTFDRDMFQQALERMLSWESWNRRVAEEYQKLQAQRDELYAKYLADGGAWLEALQSFEKQREVELAEESFAAKSEYLITRRQIRGWKQVYEKWSQLPEHAAQEQFWQVVADVQTSLPGAFGDPKVYQFLSQPEHHHIWRGYPNRLFHYSDYNGVRKKLQRARHDATFTLPDPVEHPLWIRFDARGGNIHDYEISQNGKQYQVTFSRLLWPENETWVERENVTVAIGASQQLKRQIRLDGYADKKQKVRYRDYSSGIELTGVLGGAKIQFDRRHLRKASNRLADGETGPVYLNVVVDIEPFLAMRNGRLQTPIGQVLQVNTKDWPKVTGYKPAELISWIQNSPLAVGTGVNTIEAGMRVMSVDLGQRSAAAVSIFEVMRQKPAEQETKLFYPIAVTGLYAVHRRSLLLRLPGEKISDEIEQQRKIRAHARSLVRYQIRLLADVLRLHTRGTAEQRRAKLDELLATLQTKQELDQKLWQTELEKLFDYIHEPAERWQQALVAAHRTLEPVIGQAVRHWRKSLRIDRKGLAGMSMWNIEELEETRKLLIAWSKHSRVPGEPNRLDKEETFAPQQLQHIQNVKDDRLKQMANLLVMTALGYKYDEAEKQWKEAYPACQMILFEDLSRYRFALDRPRRENNRLMKWAHRSIPRLVYLQGELFGIQVGDVYSAYTSRFHAKTGAPGIRCHALKEEDLQPNSYVVKQLIKDGFIREDQTGSLKPGQIVPWSGGELFVTLADRSGSRLAVIHADINAAQNLQKRFWQQNTEIFRVPCKVTTSGLIPAYDKMKKLFGKGYFAKINQTDTSEVYVWEHSAKMKGKTTPADPAEEGVFDESLTDEMEELEDSQEGYKTLFRDPSGFFWSSDRWLPQKEFWFWVKRRIEKKLREQLQAAALEARKEAELAAATAEQ

SEQ ID NO: 62034 - protein, 1090 aa, Artificial Sequence; identical to SEQ ID NO: 61954
  Synthetic

SEQ ID NO: 62035 - DNA, 57 bp, Artificial Sequence
  Synthetic
gttagtggaaatgtagatggttagcacgccgcaaattgcacaatttgcccccagcgc

SEQ ID NO: 62036 - RNA, 111 nt, Artificial Sequence; identical to SEQ ID NO: 61989
  Synthetic

SEQ ID NO: 62037 - DNA, 45 bp, Artificial Sequence
  Synthetic
tagtggaaatgtagatggttagcacgccgcaaattgcacaatttg

SEQ ID NO: 62038 - DNA, 45 bp, Artificial Sequence
  Synthetic
tagtggaaatgtagatggttagcacctgacactactgatgctgtc

SEQ ID NO: 62039 - DNA, 82 bp, Artificial Sequence
  Synthetic
gcgctgggggcaaattgtgcaatttgcggcgtgctaaccatctacatttccactaacccctatagtgagtcgtattaatttc

SEQ ID NO: 62040 - DNA, 136 bp, Artificial Sequence
  Synthetic
cagcgcttcagcgttcttcggtgccacttctcagatttgagaagctcaacgggctttgccacctggaaagtggccattggcacacccgttgaaaaattctgtcctctagacccctatagtgagtcgtattaatttc

SEQ ID NO: 62041 - DNA, 70 bp, Artificial Sequence
  Synthetic
caaattgtgcaatttgcggcgtgctaaccatctacatttccactaccctatagtgagtcgtattaatttc

SEQ ID NO: 62042 - DNA, 70 bp, Artificial Sequence
  Synthetic
gacagcatcagtagtgtcaggtgctaaccatctacatttccactaccctatagtgagtcgtattaatttc

SEQ ID NO: 62043 - DNA, 22 bp, Artificial Sequence
  Synthetic
aacaaacccaaggaaattttgg

SEQ ID NO: 62044 - DNA, 23 bp, Artificial Sequence
  Synthetic
tattcagcaaaatgacttgatct

SEQ ID NO: 62045 - DNA, 42 bp, Artificial Sequence
  Synthetic
cattccgaagaacgctgaagcactaatcagacaaggaactga

SEQ ID NO: 62046 - DNA, 40 bp, Artificial Sequence
  Synthetic
cgcattggcatggaagtcacatccaatttgatggcacctg

SEQ ID NO: 62047 - DNA, 21 bp, Artificial Sequence
  Synthetic
caatttgcggccaatgtttgt

SEQ ID NO: 62048 - DNA, 20 bp, Artificial Sequence
  Synthetic
ttcaatggtttaacaggcac

SEQ ID NO: 62049 - DNA, 22 bp, Artificial Sequence
  Synthetic
ccaagtaggagtaagttgatct

SEQ ID NO: 62050 - DNA, 43 bp, Artificial Sequence
  Synthetic
tcagtagtgtcagcaatgtctaggtgttcttactgagtctaac

SEQ ID NO: 62051 - DNA, 44 bp, Artificial Sequence
  Synthetic
cagacacttgagattcttgacaggttagaagtatttgttcctgg

SEQ ID NO: 62052 - DNA, 20 bp, Artificial Sequence
  Synthetic
ccaaattgttggaaaggcag

SEQ ID NO: 62053 - DNA, 21 bp, Artificial Sequence
  Synthetic
tggtggtgtcagtgttataac

SEQ ID NO: 62054 - DNA, 35 bp, Artificial Sequence
  Synthetic
  misc_feature (1)..(1): /56-FAM/ fluorescent dye attachment
  misc_feature (35)..(35): 3' inverted dT /3InvdT/
  misc_feature (35)..(35): /3InvdT/ 3' inverted dT
cccaaggaaattttggggaccaggaactaatcaga

SEQ ID NO: 62055 - DNA, 24 bp, Artificial Sequence
  Synthetic
  misc_feature (24)..(24): Iowa Black FQ quencher /3IABkFQ/
cctggtccccaaaatttccttggg

SEQ ID NO: 62056 - DNA, 35 bp, Artificial Sequence
  Synthetic
  misc_feature (1)..(1): /56-FAM/ fluorescent dye attachment
  misc_feature (35)..(35): /3InvdT/ 3' inverted dT
tctgattagttcctggtccccaaaatttccttggg

SEQ ID NO: 62057 - DNA, 24 bp, Artificial Sequence
  Synthetic
  misc_feature (24)..(24): Iowa Black FQ quencher /3IABkFQ/
tttggggaccaggaactaatcaga

SEQ ID NO: 62058 - DNA, 35 bp, Artificial Sequence
  Synthetic
  misc_feature (1)..(1): /56-FAM/ fluorescent dye attachment
  misc_feature (35)..(35): /3InvdT/ 3' inverted dT
cagttcccgaaggtgtgacttccatgccaatgcgc

SEQ ID NO: 62059 - DNA, 24 bp, Artificial Sequence
  Synthetic
  misc_feature (24)..(24): Iowa Black FQ quencher /3IABkFQ/
tggaagtcacaccttcgggaactg

SEQ ID NO: 62060 - DNA, 35 bp, Artificial Sequence
  Synthetic
  misc_feature (1)..(1): /56-FAM/ fluorescent dye attachment
  misc_feature (35)..(35): /3InvdT/ 3' inverted dT
gtgcgcattggcatggaagtcacaccttcgggaac

SEQ ID NO: 62061 - DNA, 24 bp, Artificial Sequence
  Synthetic
  misc_feature (24)..(24): Iowa Black FQ quencher /3IABkFQ/
tgtgacttccatgccaatgcgcac

SEQ ID NO: 62062 - DNA, 18 bp, Artificial Sequence
  Synthetic
gctgctgaggcttctaag

SEQ ID NO: 62063 - DNA, 21 bp, Artificial Sequence
  Synthetic
gcgtcaatatgcttattcagc

SEQ ID NO: 62064 - DNA, 40 bp, Artificial Sequence; identical to SEQ ID NO: 61985
  Synthetic

SEQ ID NO: 62065 - DNA, 39 bp, Artificial Sequence; identical to SEQ ID NO: 61986
  Synthetic

SEQ ID NO: 62066 - DNA, 22 bp, Artificial Sequence
  Synthetic
ccttgtctgattagttcctggt

SEQ ID NO: 62067 - DNA, 18 bp, Artificial Sequence
  Synthetic
tggcatggaagtcacacc

SEQ ID NO: 62068 - RNA, 111 nt, Artificial Sequence; identical to SEQ ID NO: 61989
  Synthetic

SEQ ID NO: 62069 - protein, 1129 aa, Alicyclobacillus acidophilus; identical to SEQ ID NO: 61953

SEQ ID NO: 62070 - DNA, 20 bp, Artificial Sequence
  Synthetic
gaccccaaaatcagcgaaat

SEQ ID NO: 62071 - DNA, 24 bp, Artificial Sequence
  Synthetic
tctggttactgccagttgaatctg

SEQ ID NO: 62072 - DNA, 24 bp, Artificial Sequence
  Synthetic
  misc_feature (1)..(1): /FAM/ fluorescent dye attachment
  misc_feature (24)..(24): /BHQ1/ Black Hole Quencher-1
accccgcattacgtttggtggacc

SEQ ID NO: 62073 - DNA, 20 bp, Artificial Sequence
  Synthetic
ttacaaacattggccgcaaa

SEQ ID NO: 62074 - DNA, 18 bp, Artificial Sequence
  Synthetic
gcgcgacattccgaagaa

SEQ ID NO: 62075 - DNA, 23 bp, Artificial Sequence
  Synthetic
  misc_feature (1)..(1): /FAM/ fluorescent dye attachment
  misc_feature (23)..(23): /BHQ1/ Black Hole Quencher-1
acaatttgcccccagcgcttcag

SEQ ID NO: 62076 - DNA, 21 bp, Artificial Sequence
  Synthetic
acttgatgttgacgttgtagg

SEQ ID NO: 62077 - DNA, 22 bp, Artificial Sequence
  Synthetic
agttcatctacaaggtgaagct

SEQ ID NO: 62078 - DNA, 20 bp, Artificial Sequence
  Synthetic
  misc_feature (1)..(1): /FAM/ fluorescent dye attachment
  misc_feature (20)..(20): /BHQ1/ Black Hole Quencher-1
ccccgtaatgcagaagaaga

SEQ ID NO: 62079 - DNA, 251 bp, Artificial Sequence
  Synthetic
cgcaacattaaaccagtaccagaggtgaaaatactcaataatttgggtgtggacattgctgctaatactgtgatctgggactacaaaagagatgctccagcacatatatctactattggtgtttgttctatgactgacatagccaagaaaccaactgaaacgatttgtgcaccactcactgtcttttttgatggtagagttgatggtcaagtagacttatttagaaatgcccgtaatggtgttcttattac

SEQ ID NO: 62080 - DNA, 209 bp, Artificial Sequence
  Synthetic
aattacagaataatgagcttagtcctgttgcactacgacagatgtcttgtgctgccggtactacacaaactgcttgcactgatgacaatgcgttagcttactacaacacaacaaagggaggtaggtttgtacttgcactgttatccgatttacaggatttgaaatgggctagattccctaagagtgatggaactggtactatctataca

SEQ ID NO: 62081 - DNA, 338 bp, Artificial Sequence
  Synthetic
agatccatcaaaaccaagcaagaggtcatttattgaagatctacttttcaacaaagtgacacttgcagatgctggcttcatcaaacaatatggtgattgccttggtgatattgctgctagagacctcatttgtgcacaaaagtttaacggccttactgttttgccacctttgctcacagatgaaatgattgctcaatacacttctgcactgttagcgggtacaatcacttctggttggacctttggtgcaggtgctgcattacaaataccatttgctatgcaaatggcttataggtttaatggtattggagttacacagaatgttctctatgagaacc

SEQ ID NO: 62082 - DNA, 280 bp, Artificial Sequence
  Synthetic
ccctcgaggacaaggcgttccaattaacaccaatagcagtccagatgaccaaattggctactaccgaagagctaccagacgaattcgtggtggtgacggtaaaatgaaagatctcagtccaagatggtatttctactacctaggaactgggccagaagctggacttccctatggtgctaacaaagacggcatcatatgggttgcaactgagggagccttgaatacaccaaaagatcacattggcacccgcaatcctgctaacaatgctgcaatcgtgcta

SEQ ID NO: 62083 - DNA, 346 bp, Artificial Sequence
  Synthetic
taagaaatctgctgctgaggcttctaagaagcctcggcaaaaacgtactgccactaaagcatacaatgtaacacaagctttcggcagacgtggtccagaacaaacccaaggaaattttggggaccaggaactaatcagacaaggaactgattacaaacattggccgcaaattgcacaatttgcccccagcgcttcagcgttcttcggaatgtcgcgcattggcatggaagtcacaccttcgggaacgtggttgacctacacaggtgccatcaaattggatgacaaagatccaaatttcaaagatcaagtcattttgctgaataagcatattgacgcatacaaaaca

SEQ ID NO: 62084 - DNA, 334 bp, Artificial Sequence
  Synthetic
tgctgaggcttctaagaagcctcggcaaaaacgtactgccactaaagcatacaatgtaacacaagctttcggcagacgtggtccagaacaaacccaaggaaattttggggaccaggaactaatcagacaaggaactgattacaaacattggccgcaaattgcacaatttgcccccagcgcttcagcgttcttcggaatgtcgcgcattggcatggaagtcacaccttcgggaacgtggttgacctacacaggtgccatcaaattggatgacaaagatccaaatttcaaagatcaagtcattttgctgaataagcatattgacgcatacaaaaca

SEQ ID NO: 62085 - DNA, 19 bp, Artificial Sequence
  Synthetic
aaccagtaccagaggtgaa

SEQ ID NO: 62086 - DNA, 20 bp, Artificial Sequence
  Synthetic
caccattacgggcatttcta

SEQ ID NO: 62087 - DNA, 40 bp, Artificial Sequence
  Synthetic
tgtgctggagcatctcttttgttttgggtgtggacattgc

SEQ ID NO: 62088 - DNA, 44 bp, Artificial Sequence
  Synthetic
agccaagaaaccaactgaaacgctacttgaccatcaactctacc

SEQ ID NO: 62089 - DNA, 22 bp, Artificial Sequence
  Synthetic
gtcccagatcacagtattagca

SEQ ID NO: 62090 - DNA, 18 bp, Artificial Sequence
  Synthetic
tgtgcaccactcactgtc

SEQ ID NO: 62091 - DNA, 21 bp, Artificial Sequence
  Synthetic
taatgagcttagtcctgttgc

SEQ ID NO: 62092 - DNA, 22 bp, Artificial Sequence
  Synthetic
gtaccagttccatcactcttag

SEQ ID NO: 62093 - DNA, 40 bp, Artificial Sequence
  Synthetic
agctaacgcattgtcatcagtgacgacagatgtcttgtgc

SEQ ID NO: 62094 - DNA, 43 bp, Artificial Sequence
  Synthetic
aacacaacaaagggaggtaggttctagcccatttcaaatcctg

SEQ ID NO: 62095 - DNA, 21 bp, Artificial Sequence
  Synthetic
caagcagtttgtgtagtaccg

SEQ ID NO: 62096 - DNA, 22 bp, Artificial Sequence
  Synthetic
ttgtacttgcactgttatccga

SEQ ID NO: 62097 - DNA, 20 bp, Artificial Sequence
  Synthetic
aaaccaagcaagaggtcatt

SEQ ID NO: 62098 - DNA, 21 bp, Artificial Sequence
  Synthetic
gtatttgtaatgcagcacctg

SEQ ID NO: 62099 - DNA, 41 bp, Artificial Sequence
  Synthetic
tgcacaaatgaggtctctagcacagatgctggcttcatcaa

SEQ ID NO: 62100 - DNA, 42 bp, Artificial Sequence
  Synthetic
ttgccacctttgctcacagattccaaccagaagtgattgtac

SEQ ID NO: 62101 - DNA, 22 bp, Artificial Sequence
  Synthetic
caatatcaccaaggcaatcacc

SEQ ID NO: 62102 - DNA, 22 bp, Artificial Sequence
  Synthetic
tgattgctcaatacacttctgc

SEQ ID NO: 62103 - DNA, 19 bp, Artificial Sequence
  Synthetic
cagatgctggcttcatcaa

SEQ ID NO: 62104 - DNA, 22 bp, Artificial Sequence
  Synthetic
gagaacattctgtgtaactcca

SEQ ID NO: 62105 - DNA, 40 bp, Artificial Sequence
  Synthetic
tggcaaaacagtaaggccgttaatggtgattgccttggtg

SEQ ID NO: 62106 - DNA, 42 bp, Artificial Sequence
  Synthetic
ttctgcactgttagcgggtacgtatttgtaatgcagcacctg

SEQ ID NO: 62107 - DNA, 22 bp, Artificial Sequence
  Synthetic
aaatgaggtctctagcagcaat

SEQ ID NO: 62108 - DNA, 21 bp, Artificial Sequence
  Synthetic
aatcacttctggttggacctt

SEQ ID NO: 62109 - DNA, 20 bp, Artificial Sequence
  Synthetic
caaggcgttccaattaacac

SEQ ID NO: 62110 - DNA, 18 bp, Artificial Sequence
  Synthetic
gcagcattgttagcagga

SEQ ID NO: 62111 - DNA, 40 bp, Artificial Sequence
  Synthetic
accgtcaccaccacgaattccaatagcagtccagatgacc

SEQ ID NO: 62112 - DNA, 38 bp, Artificial Sequence
  Synthetic
ctaggaactgggccagaagcacccatatgatgccgtct

SEQ ID NO: 62113 - DNA, 21 bp, Artificial Sequence
  Synthetic
gctcttcggtagtagccaatt

SEQ ID NO: 62114 - DNA, 22 bp, Artificial Sequence
  Synthetic
gacttccctatggtgctaacaa

SEQ ID NO: 62115 - DNA, 18 bp, Artificial Sequence
  Synthetic
gctgctgaggcttctaag

SEQ ID NO: 62116 - DNA, 21 bp, Artificial Sequence
  Synthetic
gcgtcaatatgcttattcagc

SEQ ID NO: 62117 - DNA, 40 bp, Artificial Sequence; identical to SEQ ID NO: 61985
  Synthetic

SEQ ID NO: 62118 - DNA, 39 bp, Artificial Sequence; identical to SEQ ID NO: 61986
  Synthetic

SEQ ID NO: 62119 - DNA, 22 bp, Artificial Sequence
  Synthetic
ccttgtctgattagttcctggt

SEQ ID NO: 62120 - DNA, 18 bp, Artificial Sequence
  Synthetic
tggcatggaagtcacacc

SEQ ID NO: 62121 - DNA, 19 bp, Artificial Sequence
  Synthetic
aagatgagattggcatggc

SEQ ID NO: 62122 - DNA, 19 bp, Artificial Sequence
  Synthetic
gcaagggacttcctgtaac

SEQ ID NO: 62123 - DNA, 38 bp, Artificial Sequence
  Synthetic
ctccaaccgactgctgtctttggcttgactcaggattt

SEQ ID NO: 62124 - DNA, 42 bp, Artificial Sequence
  Synthetic
cccaaagttcacaatgtggccgcatctcatatttggaatgac

SEQ ID NO: 62125 - DNA, 18 bp, Artificial Sequence
  Synthetic
accttcaccgttccagtt

SEQ ID NO: 62126 - DNA, 22 bp, Artificial Sequence
  Synthetic
ggactttgattgcacattgttg

SEQ ID NO: 62127 - DNA, 18 bp, Artificial Sequence
  Synthetic
actcttccagccttcctt

SEQ ID NO: 62128 - DNA, 19 bp, Artificial Sequence
  Synthetic
gatccacacggagtacttg

SEQ ID NO: 62129 - DNA, 40 bp, Artificial Sequence
  Synthetic
tgtgttggcgtacaggtcaactaccttcaactccatcatg

SEQ ID NO: 62130 - DNA, 41 bp, Artificial Sequence
  Synthetic
caccatgtaccctggcattgatcttgatcttcattgtgctg

SEQ ID NO: 62131 - DNA, 18 bp, Artificial Sequence
  Synthetic
ggatgtccacgtcacact

SEQ ID NO: 62132 - DNA, 19 bp, Artificial Sequence
  Synthetic
gacaggatgcagaaggaga

SEQ ID NO: 62133 - DNA, 18 bp, Artificial Sequence
  Synthetic
ggccgtcttcccctccat

SEQ ID NO: 62134 - DNA, 20 bp, Artificial Sequence
  Synthetic
cgcagctcattgtagaaggt

SEQ ID NO: 62135 - DNA, 35 bp, Artificial Sequence
  Synthetic
ttgctctgggcctcgtcgcaggcaccagggcgtga

SEQ ID NO: 62136 - DNA, 42 bp, Artificial Sequence
  Synthetic
tgaagtaccccatcgagcacgggtggtgccagattttctcca

SEQ ID NO: 62137 - DNA, 21 bp, Artificial Sequence
  Synthetic
ccttctgacccatgcccacca

SEQ ID NO: 62138 - DNA, 22 bp, Artificial Sequence
  Synthetic
catcgtcaccaactgggacgac

SEQ ID NO: 62139 - DNA, 16 bp, Artificial Sequence
  Synthetic
gcaccagggcgtgatg

SEQ ID NO: 62140 - DNA, 16 bp, Artificial Sequence
  Synthetic
tcagcagcacggggtg

SEQ ID NO: 62141 - DNA, 40 bp, Artificial Sequence
  Synthetic
gaggatgcctctcttgctctgggtgggcatgggtcagaag

SEQ ID NO: 62142 - DNA, 41 bp, Artificial Sequence
  Synthetic
agtaccccatcgagcacggcacgcagctcattgtagaaggt

SEQ ID NO: 62143 - DNA, 22 bp, Artificial Sequence
  Synthetic
cctcgtcgcccacataggaatc

SEQ ID NO: 62144 - DNA, 21 bp, Artificial Sequence
  Synthetic
tcgtcaccaactgggacgaca

SEQ ID NO: 62145 - DNA, 20 bp, Artificial Sequence
  Synthetic
tacgttgctatccaggctgt

SEQ ID NO: 62146 - DNA, 16 bp, Artificial Sequence
  Synthetic
agtcaggtcccggcca

SEQ ID NO: 62147 - DNA, 39 bp, Artificial Sequence
  Synthetic
tgaccccgtcaccggagtccgctatccctgtacgcctct

SEQ ID NO: 62148 - DNA, 39 bp, Artificial Sequence
  Synthetic
cccacactgtgcccatctacgcaggtccagacgcaggat

SEQ ID NO: 62149 - DNA, 19 bp, Artificial Sequence
  Synthetic
cgatgccagtggtacggcc

SEQ ID NO: 62150 - DNA, 19 bp, Artificial Sequence
  Synthetic
ggggtatgccctcccccat

SEQ ID NO: 62151 - DNA, 19 bp, Artificial Sequence
  Synthetic
gctatccctgtacgcctct

SEQ ID NO: 62152 - DNA, 20 bp, Artificial Sequence
  Synthetic
cggtgaggatcttcatgagg

SEQ ID NO: 62153 - DNA, 36 bp, Artificial Sequence
  Synthetic
agatgggcacagtgtgggtgggccgtaccactggca

SEQ ID NO: 62154 - DNA, 35 bp, Artificial Sequence
  Synthetic
ggggtatgccctcccccattcagtcaggtcccggc

SEQ ID NO: 62155 - DNA, 21 bp, Artificial Sequence
  Synthetic
cgtcaccggagtccatcacga

SEQ ID NO: 62156 - DNA, 19 bp, Artificial Sequence
  Synthetic
gccatcctgcgtctggacc

SEQ ID NO: 62157 - DNA, 18 bp, Artificial Sequence
  Synthetic
gggaaatcgtgcgtgaca

SEQ ID NO: 62158 - DNA, 18 bp, Artificial Sequence
  Synthetic
ggctggaagagtgcctca

SEQ ID NO: 62159 - DNA, 39 bp, Artificial Sequence
  Synthetic
ggaagcagccgtggccatcaaggagaagctgtgctacgt

SEQ ID NO: 62160 - DNA, 40 bp, Artificial Sequence
  Synthetic
tcctccctggagaagagctacgccgctcattgccaatggt

SEQ ID NO: 62161 - DNA, 19 bp, Artificial Sequence
  Synthetic
ttgctcgaagtccagggcg

SEQ ID NO: 62162 - DNA, 20 bp, Artificial Sequence
  Synthetic
aaggagaagctgtgctacgt

SEQ ID NO: 62163 - DNA, 17 bp, Artificial Sequence
  Synthetic
tgcccaggaaggaaggc

SEQ ID NO: 62164 - DNA, 39 bp, Artificial Sequence
  Synthetic
cgtagctcttctccagggaggagccctggacttcgagca

SEQ ID NO: 62165 - DNA, 39 bp, Artificial Sequence
  Synthetic
cctgacggccaggtcatcacctggaagagtgcctcaggg

SEQ ID NO: 62166 - DNA, 18 bp, Artificial Sequence
  Synthetic
agcagccgtggccatctc

SEQ ID NO: 62167 - DNA, 21 bp, Artificial Sequence
  Synthetic
attggcaatgagcggttccgc

SEQ ID NO: 62168 - DNA, 20 bp, Artificial Sequence
  Synthetic
ggcatccacgaaactacctt

SEQ ID NO: 62169 - DNA, 18 bp, Artificial Sequence
  Synthetic
acttgcgctcaggaggag

SEQ ID NO: 62170 - DNA, 40 bp, Artificial Sequence
  Synthetic
ccgccagacagcactgtgtttcatgaagtgtgacgtggac

SEQ ID NO: 62171 - DNA, 39 bp, Artificial Sequence
  Synthetic
caccaccatgtaccctggcatttcattgtgctgggtgcc

SEQ ID NO: 62172 - DNA, 21 bp, Artificial Sequence
  Synthetic
ggcgtacaggtctttgcggat

SEQ ID NO: 62173 - DNA, 20 bp, Artificial Sequence
  Synthetic
tgccgacaggatgcagaagg

SEQ ID NO: 62174 - DNA, 20 bp, Artificial Sequence
  Synthetic
atgcagaaggagatcactgc

SEQ ID NO: 62175 - DNA, 18 bp, Artificial Sequence
  Synthetic
tttgcggtggacgatgga

SEQ ID NO: 62176 - DNA, 39 bp, Artificial Sequence
  Synthetic
cacacggagtacttgcgctcactggcacccagcacaatg

SEQ ID NO: 62177 - DNA, 40 bp, Artificial Sequence
  Synthetic
ctccatcctggcctcgctgtcgtcatactcctgcttgctg

SEQ ID NO: 62178 - DNA, 22 bp, Artificial Sequence
  Synthetic
ccaccttccagcagatgtggat

SEQ ID NO: 62179 - DNA, 19 bp, Artificial Sequence
  Synthetic
aaagggtcatcatctctgc

SEQ ID NO: 62180 - DNA, 18 bp, Artificial Sequence
  Synthetic
atgatgttctggagagcc

SEQ ID NO: 62181 - DNA, 40 bp, Artificial Sequence
  Synthetic
gctaagcagttggtggtggaaccatgagaagtatgacaac

SEQ ID NO: 62182 - DNA, 38 bp, Artificial Sequence
  Synthetic
ggtatcgtggaaggactcatccatccacagtcttctgg

SEQ ID NO: 62183 - DNA, 19 bp, Artificial Sequence
  Synthetic
ttgctgatgatcttgaggc

SEQ ID NO: 62184 - DNA, 18 bp, Artificial Sequence
  Synthetic
cagtccatgccatcactg

SEQ ID NO: 62185 - DNA, 21 bp, Artificial Sequence
  Synthetic
atgagaagtatgacaacagcc

SEQ ID NO: 62186 - DNA, 19 bp, Artificial Sequence
  Synthetic
gatgatgttctggagagcc

SEQ ID NO: 62187 - DNA, 38 bp, Artificial Sequence
  Synthetic
tgtcatggatgaccttggcagatcatcagcaatgcctc

SEQ ID NO: 62188 - DNA, 39 bp, Artificial Sequence
  Synthetic
ggtatcgtggaaggactcatggccatccacagtcttctg

SEQ ID NO: 62189 - DNA, 18 bp, Artificial Sequence
  Synthetic
gctaagcagttggtggtg

SEQ ID NO: 62190 - DNA, 18 bp, Artificial Sequence
  Synthetic
acagtccatgccatcact

SEQ ID NO: 62191 - DNA, 18 bp, Artificial Sequence
  Synthetic
gtgaaggtcggagtcaac

SEQ ID NO: 62192 - DNA, 18 bp, Artificial Sequence
  Synthetic
ctccatggtggtgaagac

SEQ ID NO: 62193 - DNA, 42 bp, Artificial Sequence
  Synthetic
gggtggaatcatattggaacatagtggatattgttgccatca

SEQ ID NO: 62194 - DNA, 36 bp, Artificial Sequence
  Synthetic
caccgtcaaggctgagaaatctcgctcctggaagat

SEQ ID NO: 62195 - DNA, 21 bp, Artificial Sequence
  Synthetic
accatgtagttgaggtcaatg

SEQ ID NO: 62196 - DNA, 20 bp, Artificial Sequence
  Synthetic
ggaagcttgtcatcaatgga

SEQ ID NO: 62197 - DNA, 22 bp, Artificial Sequence
  Synthetic
accatgagaagtatgacaacag

SEQ ID NO: 62198 - DNA, 19 bp, Artificial Sequence
  Synthetic
gatgatgttctggagagcc

SEQ ID NO: 62199 - DNA, 39 bp, Artificial Sequence
  Synthetic
tgtcatggatgaccttggcctcaagatcatcagcaatgc

SEQ ID NO: 62200 - DNA, 39 bp, Artificial Sequenceq; identical to SEQ ID NO: 62188
  Synthetic

SEQ ID NO: 62201 - DNA, 18 bp, Artificial Sequence
  Synthetic
gctaagcagttggtggtg

SEQ ID NO: 62202 - DNA, 18 bp, Artificial Sequence
  Synthetic
acagtccatgccatcact

SEQ ID NO: 62203 - DNA, 18 bp, Artificial Sequence
  Synthetic
gtgaaggtcggagtcaac

SEQ ID NO: 62204 - DNA, 18 bp, Artificial Sequence
  Synthetic
gactccacgacgtactca

SEQ ID NO: 62205 - DNA, 44 bp, Artificial Sequence
  Synthetic
tgggtggaatcatattggaacaggatattgttgccatcaatgac

SEQ ID NO: 62206 - DNA, 36 bp, Artificial Sequence
  Synthetic
accgtcaaggctgagaacgatctcgctcctggaaga

SEQ ID NO: 62207 - DNA, 22 bp, Artificial Sequence
  Synthetic
aaccatgtagttgaggtcaatg

SEQ ID NO: 62208 - DNA, 21 bp, Artificial Sequence
  Synthetic
ggaagcttgtcatcaatggaa

SEQ ID NO: 62209 - DNA, 20 bp, Artificial Sequence
  Synthetic
tggtatcgtggaaggactca

SEQ ID NO: 62210 - DNA, 19 bp, Artificial Sequence
  Synthetic
cgttcagctcagggatgac

SEQ ID NO: 62211 - DNA, 38 bp, Artificial Sequence
  Synthetic
acgccacagtttcccggaggtgaccacagtccatgcca

SEQ ID NO: 62212 - DNA, 36 bp, Artificial Sequence
  Synthetic
cgcggggctctccagaacacttgcccacagccttgg

SEQ ID NO: 62213 - DNA, 22 bp, Artificial Sequence
  Synthetic
acagtcttctgggtggcagtga

SEQ ID NO: 62214 - DNA, 21 bp, Artificial Sequence
  Synthetic
catccctgcctctactggcgc

SEQ ID NO: 62215 - DNA, 20 bp, Artificial Sequence
  Synthetic
tcgtggaaggactcatgacc

SEQ ID NO: 62216 - DNA, 19 bp, Artificial Sequence
  Synthetic
cgttcagctcagggatgac

SEQ ID NO: 62217 - DNA, 40 bp, Artificial Sequence
  Synthetic
acgccacagtttcccggaggacagtccatgccatcactgc

SEQ ID NO: 62218 - DNA, 36 bp, Artificial Sequence; identical to SEQ ID NO: 62212
  Synthetic

SEQ ID NO: 62219 - DNA, 22 bp, Artificial Sequence
  Synthetic
gccatccacagtcttctgggtg

SEQ ID NO: 62220 - DNA, 21 bp, Artificial Sequence
  Synthetic
catccctgcctctactggcgc

SEQ ID NO: 62221 - DNA, 19 bp, Artificial Sequence
  Synthetic
gaccacagtccatgccatc

SEQ ID NO: 62222 - DNA, 17 bp, Artificial Sequence
  Synthetic
ggccatgccagtgagct

SEQ ID NO: 62223 - DNA, 37 bp, Artificial Sequence
  Synthetic
tgttctggagagccccgcgactgccacccagaagact

SEQ ID NO: 62224 - DNA, 40 bp, Artificial Sequence
  Synthetic
catccctgcctctactggcgctcccgttcagctcagggat

SEQ ID NO: 62225 - DNA, 20 bp, Artificial Sequence
  Synthetic
acgccacagtttcccggagg

SEQ ID NO: 62226 - DNA, 18 bp, Artificial Sequence
  Synthetic
tgccaaggctgtgggcaa

SEQ ID NO: 62227 - DNA, 16 bp, Artificial Sequence
  Synthetic
gcgctgccaaggctgt

SEQ ID NO: 62228 - DNA, 18 bp, Artificial Sequence
  Synthetic
cccaggatgcccttgagg

SEQ ID NO: 62229 - DNA, 37 bp, Artificial Sequence
  Synthetic
gtggggacacggaaggccagggcaaggtcatccctga

SEQ ID NO: 62230 - DNA, 41 bp, Artificial Sequence
  Synthetic
tgccaacgtgtcagtggtggactgcttcaccaccttcttga

SEQ ID NO: 62231 - DNA, 21 bp, Artificial Sequence
  Synthetic
ccagtgagcttcccgttcagc

SEQ ID NO: 62232 - DNA, 22 bp, Artificial Sequence
  Synthetic
tgccgtctagaaaaacctgcca

SEQ ID NO: 62233 - DNA, 111 bp, Artificial Sequence
  Synthetic
gtctagaggacagaatttttcaacgggtgtgccaatggccactttccaggtggcaaagcccgttgagcttctcaaatctgagaagtggcactagtcccagatcacagtatt

SEQ ID NO: 62234 - DNA, 111 bp, Artificial Sequence
  Synthetic
gtctagaggacagaatttttcaacgggtgtgccaatggccactttccaggtggcaaagcccgttgagcttctcaaatctgagaagtggcacgtagtcccagatcacagtat

SEQ ID NO: 62235 - DNA, 111 bp, Artificial Sequence
  Synthetic
gtctagaggacagaatttttcaacgggtgtgccaatggccactttccaggtggcaaagcccgttgagcttctcaaatctgagaagtggcactgtagtcccagatcacagta

SEQ ID NO: 62236 - DNA, 111 bp, Artificial Sequence
  Synthetic
gtctagaggacagaatttttcaacgggtgtgccaatggccactttccaggtggcaaagcccgttgagcttctcaaatctgagaagtggcacctgctaatactgtgatctgg

SEQ ID NO: 62237 - DNA, 111 bp, Artificial Sequence
  Synthetic
gtctagaggacagaatttttcaacgggtgtgccaatggccactttccaggtggcaaagcccgttgagcttctcaaatctgagaagtggcacgctatgtcagtcatagaaca

SEQ ID NO: 62238 - DNA, 111 bp, Artificial Sequence
  Synthetic
gtctagaggacagaatttttcaacgggtgtgccaatggccactttccaggtggcaaagcccgttgagcttctcaaatctgagaagtggcacttggctatgtcagtcataga

SEQ ID NO: 62239 - DNA, 111 bp, Artificial Sequence
  Synthetic
gtctagaggacagaatttttcaacgggtgtgccaatggccactttccaggtggcaaagcccgttgagcttctcaaatctgagaagtggcaccttggctatgtcagtcatag

SEQ ID NO: 62240 - DNA, 111 bp, Artificial Sequence
  Synthetic
gtctagaggacagaatttttcaacgggtgtgccaatggccactttccaggtggcaaagcccgttgagcttctcaaatctgagaagtggcacgtttcttggctatgtcagtc

SEQ ID NO: 62241 - DNA, 111 bp, Artificial Sequence
  Synthetic
gtctagaggacagaatttttcaacgggtgtgccaatggccactttccaggtggcaaagcccgttgagcttctcaaatctgagaagtggcacgtgtttgttctatgactgac

SEQ ID NO: 62242 - DNA, 111 bp, Artificial Sequence
  Synthetic
gtctagaggacagaatttttcaacgggtgtgccaatggccactttccaggtggcaaagcccgttgagcttctcaaatctgagaagtggcacagttggtttcttggctatgt

SEQ ID NO: 62243 - DNA, 111 bp, Artificial Sequence
  Synthetic
gtctagaggacagaatttttcaacgggtgtgccaatggccactttccaggtggcaaagcccgttgagcttctcaaatctgagaagtggcaccagttggtttcttggctatg

SEQ ID NO: 62244 - DNA, 111 bp, Artificial Sequence
  Synthetic
gtctagaggacagaatttttcaacgggtgtgccaatggccactttccaggtggcaaagcccgttgagcttctcaaatctgagaagtggcacgttctatgactgacatagcc

SEQ ID NO: 62245 - DNA, 111 bp, Artificial Sequence
  Synthetic
gtctagaggacagaatttttcaacgggtgtgccaatggccactttccaggtggcaaagcccgttgagcttctcaaatctgagaagtggcacttctatgactgacatagcca

SEQ ID NO: 62246 - DNA, 111 bp, Artificial Sequence
  Synthetic
gtctagaggacagaatttttcaacgggtgtgccaatggccactttccaggtggcaaagcccgttgagcttctcaaatctgagaagtggcactatgactgacatagccaaga

SEQ ID NO: 62247 - DNA, 111 bp, Artificial Sequence
  Synthetic
gtctagaggacagaatttttcaacgggtgtgccaatggccactttccaggtggcaaagcccgttgagcttctcaaatctgagaagtggcacgtgcaccactcactgtcttt

SEQ ID NO: 62248 - DNA, 111 bp, Artificial Sequence
  Synthetic
gtctagaggacagaatttttcaacgggtgtgccaatggccactttccaggtggcaaagcccgttgagcttctcaaatctgagaagtggcactgcaccactcactgtctttt

SEQ ID NO: 62249 - DNA, 111 bp, Artificial Sequence
  Synthetic
gtctagaggacagaatttttcaacgggtgtgccaatggccactttccaggtggcaaagcccgttgagcttctcaaatctgagaagtggcactgcacaaatgaggtctctag

SEQ ID NO: 62250 - DNA, 111 bp, Artificial Sequence
  Synthetic
gtctagaggacagaatttttcaacgggtgtgccaatggccactttccaggtggcaaagcccgttgagcttctcaaatctgagaagtggcacccttggtgatattgctgcta

SEQ ID NO: 62251 - DNA, 111 bp, Artificial Sequence
  Synthetic
gtctagaggacagaatttttcaacgggtgtgccaatggccactttccaggtggcaaagcccgttgagcttctcaaatctgagaagtggcacgtgcacaaatgaggtctcta

SEQ ID NO: 62252 - DNA, 111 bp, Artificial Sequence
  Synthetic
gtctagaggacagaatttttcaacgggtgtgccaatggccactttccaggtggcaaagcccgttgagcttctcaaatctgagaagtggcactgtgcacaaatgaggtctct

SEQ ID NO: 62253 - DNA, 111 bp, Artificial Sequence
  Synthetic
gtctagaggacagaatttttcaacgggtgtgccaatggccactttccaggtggcaaagcccgttgagcttctcaaatctgagaagtggcacaacttttgtgcacaaatgag

SEQ ID NO: 62254 - DNA, 111 bp, Artificial Sequence
  Synthetic
gtctagaggacagaatttttcaacgggtgtgccaatggccactttccaggtggcaaagcccgttgagcttctcaaatctgagaagtggcacgtgcacaaaagtttaacggc

SEQ ID NO: 62255 - DNA, 111 bp, Artificial Sequence
  Synthetic
gtctagaggacagaatttttcaacgggtgtgccaatggccactttccaggtggcaaagcccgttgagcttctcaaatctgagaagtggcactgcacaaaagtttaacggcc

SEQ ID NO: 62256 - DNA, 111 bp, Artificial Sequence
  Synthetic
gtctagaggacagaatttttcaacgggtgtgccaatggccactttccaggtggcaaagcccgttgagcttctcaaatctgagaagtggcacaacggccttactgttttgcc

SEQ ID NO: 62257 - DNA, 111 bp, Artificial Sequence
  Synthetic
gtctagaggacagaatttttcaacgggtgtgccaatggccactttccaggtggcaaagcccgttgagcttctcaaatctgagaagtggcacacggccttactgttttgcca

SEQ ID NO: 62258 - DNA, 111 bp, Artificial Sequence
  Synthetic
gtctagaggacagaatttttcaacgggtgtgccaatggccactttccaggtggcaaagcccgttgagcttctcaaatctgagaagtggcacctgttttgccacctttgctc

SEQ ID NO: 62259 - DNA, 111 bp, Artificial Sequence
  Synthetic
gtctagaggacagaatttttcaacgggtgtgccaatggccactttccaggtggcaaagcccgttgagcttctcaaatctgagaagtggcactgccacctttgctcacagat

SEQ ID NO: 62260 - DNA, 111 bp, Artificial Sequence
  Synthetic
gtctagaggacagaatttttcaacgggtgtgccaatggccactttccaggtggcaaagcccgttgagcttctcaaatctgagaagtggcacgccacctttgctcacagatg

SEQ ID NO: 62261 - DNA, 111 bp, Artificial Sequence
  Synthetic
gtctagaggacagaatttttcaacgggtgtgccaatggccactttccaggtggcaaagcccgttgagcttctcaaatctgagaagtggcacccacctttgctcacagatga

SEQ ID NO: 62262 - DNA, 111 bp, Artificial Sequence
  Synthetic
gtctagaggacagaatttttcaacgggtgtgccaatggccactttccaggtggcaaagcccgttgagcttctcaaatctgagaagtggcacgctcacagatgaaatgattg

SEQ ID NO: 62263 - DNA, 111 bp, Artificial Sequence
  Synthetic
gtctagaggacagaatttttcaacgggtgtgccaatggccactttccaggtggcaaagcccgttgagcttctcaaatctgagaagtggcacctcacagatgaaatgattgc

SEQ ID NO: 62264 - DNA, 111 bp, Artificial Sequence
  Synthetic
gtctagaggacagaatttttcaacgggtgtgccaatggccactttccaggtggcaaagcccgttgagcttctcaaatctgagaagtggcacgtctggtagctcttcggtag

SEQ ID NO: 62265 - DNA, 111 bp, Artificial Sequence
  Synthetic
gtctagaggacagaatttttcaacgggtgtgccaatggccactttccaggtggcaaagcccgttgagcttctcaaatctgagaagtggcacccgtcaccaccacgaattcg

SEQ ID NO: 62266 - DNA, 111 bp, Artificial Sequence
  Synthetic
gtctagaggacagaatttttcaacgggtgtgccaatggccactttccaggtggcaaagcccgttgagcttctcaaatctgagaagtggcacaccgtcaccaccacgaattc

SEQ ID NO: 62267 - DNA, 111 bp, Artificial Sequence
  Synthetic
gtctagaggacagaatttttcaacgggtgtgccaatggccactttccaggtggcaaagcccgttgagcttctcaaatctgagaagtggcactaccgtcaccaccacgaatt

SEQ ID NO: 62268 - DNA, 111 bp, Artificial Sequence
  Synthetic
gtctagaggacagaatttttcaacgggtgtgccaatggccactttccaggtggcaaagcccgttgagcttctcaaatctgagaagtggcacattttaccgtcaccaccacg

SEQ ID NO: 62269 - DNA, 111 bp, Artificial Sequence
  Synthetic
gtctagaggacagaatttttcaacgggtgtgccaatggccactttccaggtggcaaagcccgttgagcttctcaaatctgagaagtggcaccattttaccgtcaccaccac

SEQ ID NO: 62270 - DNA, 111 bp, Artificial Sequence
  Synthetic
gtctagaggacagaatttttcaacgggtgtgccaatggccactttccaggtggcaaagcccgttgagcttctcaaatctgagaagtggcacgactgagatctttcatttta

SEQ ID NO: 62271 - DNA, 111 bp, Artificial Sequence
  Synthetic
gtctagaggacagaatttttcaacgggtgtgccaatggccactttccaggtggcaaagcccgttgagcttctcaaatctgagaagtggcacgtggtggtgacggtaaaatg

SEQ ID NO: 62272 - DNA, 111 bp, Artificial Sequence
  Synthetic
gtctagaggacagaatttttcaacgggtgtgccaatggccactttccaggtggcaaagcccgttgagcttctcaaatctgagaagtggcacctaggtagtagaaataccat

SEQ ID NO: 62273 - DNA, 111 bp, Artificial Sequence
  Synthetic
gtctagaggacagaatttttcaacgggtgtgccaatggccactttccaggtggcaaagcccgttgagcttctcaaatctgagaagtggcactggcccagttcctaggtagt

SEQ ID NO: 62274 - DNA, 111 bp, Artificial Sequence
  Synthetic
gtctagaggacagaatttttcaacgggtgtgccaatggccactttccaggtggcaaagcccgttgagcttctcaaatctgagaagtggcacctactacctaggaactgggc

SEQ ID NO: 62275 - DNA, 111 bp, Artificial Sequence
  Synthetic
gtctagaggacagaatttttcaacgggtgtgccaatggccactttccaggtggcaaagcccgttgagcttctcaaatctgagaagtggcactactacctaggaactgggcc

SEQ ID NO: 62276 - DNA, 111 bp, Artificial Sequence
  Synthetic
gtctagaggacagaatttttcaacgggtgtgccaatggccactttccaggtggcaaagcccgttgagcttctcaaatctgagaagtggcacctggtccccaaaatttcctt

SEQ ID NO: 62277 - DNA, 111 bp, Artificial Sequence
  Synthetic
gtctagaggacagaatttttcaacgggtgtgccaatggccactttccaggtggcaaagcccgttgagcttctcaaatctgagaagtggcacgttcctggtccccaaaattt

SEQ ID NO: 62278 - DNA, 111 bp, Artificial Sequence
  Synthetic
gtctagaggacagaatttttcaacgggtgtgccaatggccactttccaggtggcaaagcccgttgagcttctcaaatctgagaagtggcactctgattagttcctggtccc

SEQ ID NO: 62279 - DNA, 111 bp, Artificial Sequence
  Synthetic
gtctagaggacagaatttttcaacgggtgtgccaatggccactttccaggtggcaaagcccgttgagcttctcaaatctgagaagtggcaccttgtctgattagttcctgg

SEQ ID NO: 62280 - DNA, 111 bp, Artificial Sequence
  Synthetic
gtctagaggacagaatttttcaacgggtgtgccaatggccactttccaggtggcaaagcccgttgagcttctcaaatctgagaagtggcactaatcagttccttgtctgat

SEQ ID NO: 62281 - DNA, 111 bp, Artificial Sequence
  Synthetic
gtctagaggacagaatttttcaacgggtgtgccaatggccactttccaggtggcaaagcccgttgagcttctcaaatctgagaagtggcacgtaatcagttccttgtctga

SEQ ID NO: 62282 - DNA, 111 bp, Artificial Sequence
  Synthetic
gtctagaggacagaatttttcaacgggtgtgccaatggccactttccaggtggcaaagcccgttgagcttctcaaatctgagaagtggcaccggccaatgtttgtaatcag

SEQ ID NO: 62283 - DNA, 111 bp, Artificial Sequence
  Synthetic
gtctagaggacagaatttttcaacgggtgtgccaatggccactttccaggtggcaaagcccgttgagcttctcaaatctgagaagtggcacgcggccaatgtttgtaatca

SEQ ID NO: 62284 - DNA, 111 bp, Artificial Sequence
  Synthetic
gtctagaggacagaatttttcaacgggtgtgccaatggccactttccaggtggcaaagcccgttgagcttctcaaatctgagaagtggcactgcaatttgcggccaatgtt

SEQ ID NO: 62285 - DNA, 111 bp, Artificial Sequence
  Synthetic
gtctagaggacagaatttttcaacgggtgtgccaatggccactttccaggtggcaaagcccgttgagcttctcaaatctgagaagtggcacgccgcaaattgcacaatttg

SEQ ID NO: 62286 - DNA, 111 bp, Artificial Sequence
  Synthetic
gtctagaggacagaatttttcaacgggtgtgccaatggccactttccaggtggcaaagcccgttgagcttctcaaatctgagaagtggcaccgaagaacgctgaagcgctg

SEQ ID NO: 62287 - DNA, 111 bp, Artificial Sequence
  Synthetic
gtctagaggacagaatttttcaacgggtgtgccaatggccactttccaggtggcaaagcccgttgagcttctcaaatctgagaagtggcaccacaatttgcccccagcgct

SEQ ID NO: 62288 - DNA, 111 bp, Artificial Sequence
  Synthetic
gtctagaggacagaatttttcaacgggtgtgccaatggccactttccaggtggcaaagcccgttgagcttctcaaatctgagaagtggcacgcccccagcgcttcagcgtt

SEQ ID NO: 62289 - DNA, 111 bp, Artificial Sequence
  Synthetic
gtctagaggacagaatttttcaacgggtgtgccaatggccactttccaggtggcaaagcccgttgagcttctcaaatctgagaagtggcaccccccagcgcttcagcgttc

SEQ ID NO: 62290 - DNA, 111 bp, Artificial Sequence
  Synthetic
gtctagaggacagaatttttcaacgggtgtgccaatggccactttccaggtggcaaagcccgttgagcttctcaaatctgagaagtggcacagcgttcttcggaatgtcgc

SEQ ID NO: 62291 - DNA, 111 bp, Artificial Sequence
  Synthetic
gtctagaggacagaatttttcaacgggtgtgccaatggccactttccaggtggcaaagcccgttgagcttctcaaatctgagaagtggcacttcggaatgtcgcgcattgg

SEQ ID NO: 62292 - DNA, 111 bp, Artificial Sequence
  Synthetic
gtctagaggacagaatttttcaacgggtgtgccaatggccactttccaggtggcaaagcccgttgagcttctcaaatctgagaagtggcacggaatgtcgcgcattggcat

SEQ ID NO: 62293 - DNA, 111 bp, Artificial Sequence
  Synthetic
gtctagaggacagaatttttcaacgggtgtgccaatggccactttccaggtggcaaagcccgttgagcttctcaaatctgagaagtggcacgcatggaagtcacaccttcg
